United States Patent Application Publication US 2026/0035702 A1 - sequence listing, part 2

SEQ ID NO: 3808 - RNA, 21 nt, synthetic construct
  source 1..21: mol_type = other RNA
  modified_base 1: mod_base = OTHER; note = 2'-O-methylcytidine-3'-phosphate
  modified_base 2: mod_base = OTHER; note = 2'-O-methyladenosine-3'-phosphate
  modified_base 3: mod_base = OTHER; note = 2'-O-methyluridine-3'-phosphate
  modified_base 4: mod_base = OTHER; note = 2'-O-methyladenosine-3'-phosphate
  modified_base 5: mod_base = OTHER; note = 2'-O-methylcytidine-3'-phosphate
  modified_base 6: mod_base = OTHER; note = 2'-O-methyladenosine-3'-phosphate
  modified_base 7: mod_base = OTHER; note = 2'-deoxy-2'-fluoroadenosine-3'-phosphate
  modified_base 8: mod_base = OTHER; note = 2'-O-methylcytidine-3'-phosphate
  modified_base 9: mod_base = OTHER; note = 2'-deoxy-2'-fluorocytidine-3'-phosphate
  modified_base 10: mod_base = OTHER; note = 2'-deoxy-2'-fluoroadenosine-3'-phosphate
  modified_base 11: mod_base = OTHER; note = 2'-deoxy-2'-fluoroadenosine-3'-phosphate
  modified_base 12: mod_base = OTHER; note = 2'-O-methylcytidine-3'-phosphate
  modified_base 13: mod_base = OTHER; note = 2'-O-methyladenosine-3'-phosphate
  modified_base 14: mod_base = OTHER; note = 2'-O-methylguanosine-3'-phosphate
  modified_base 15: mod_base = OTHER; note = 2'-O-methylcytidine-3'-phosphate
  modified_base 16: mod_base = OTHER; note = 2'-O-methylcytidine-3'-phosphate
  modified_base 17: mod_base = OTHER; note = 2'-O-methyladenosine-3'-phosphate
  modified_base 18: mod_base = OTHER; note = 2'-O-methyladenosine-3'-phosphate
  modified_base 19: mod_base = OTHER; note = 2'-O-methylguanosine-3'-phosphate
  modified_base 20: mod_base = OTHER; note = 2'-O-methyluridine-3'-phosphate
  modified_base 21: mod_base = OTHER; note = 2'-O-methyladenosine
catacaaccaacagccaagta

SEQ ID NO: 3809 - RNA, 21 nt, synthetic construct
  source 1..21: mol_type = other RNA
  modified_base 1: mod_base = OTHER; note = 2'-O-methyladenosine-3'-phosphate
  modified_base 2: mod_base = OTHER; note = 2'-O-methyluridine-3'-phosphate
  modified_base 3: mod_base = OTHER; note = 2'-O-methyladenosine-3'-phosphate
  modified_base 4: mod_base = OTHER; note = 2'-O-methylcytidine-3'-phosphate
  modified_base 5: mod_base = OTHER; note = 2'-O-methyladenosine-3'-phosphate
  modified_base 6: mod_base = OTHER; note = 2'-O-methyladenosine-3'-phosphate
  modified_base 7: mod_base = OTHER; note = 2'-deoxy-2'-fluorocytidine-3'-phosphate
  modified_base 8: mod_base = OTHER; note = 2'-O-methylcytidine-3'-phosphate
  modified_base 9: mod_base = OTHER; note = 2'-deoxy-2'-fluoroadenosine-3'-phosphate
  modified_base 10: mod_base = OTHER; note = 2'-deoxy-2'-fluoroadenosine-3'-phosphate
  modified_base 11: mod_base = OTHER; note = 2'-deoxy-2'-fluorocytidine-3'-phosphate
  modified_base 12: mod_base = OTHER; note = 2'-O-methyladenosine-3'-phosphate
  modified_base 13: mod_base = OTHER; note = 2'-O-methylguanosine-3'-phosphate
  modified_base 14: mod_base = OTHER; note = 2'-O-methylcytidine-3'-phosphate
  modified_base 15: mod_base = OTHER; note = 2'-O-methylcytidine-3'-phosphate
  modified_base 16: mod_base = OTHER; note = 2'-O-methyladenosine-3'-phosphate
  modified_base 17: mod_base = OTHER; note = 2'-O-methyladenosine-3'-phosphate
  modified_base 18: mod_base = OTHER; note = 2'-O-methylguanosine-3'-phosphate
  modified_base 19: mod_base = OTHER; note = 2'-O-methyluridine-3'-phosphate
  modified_base 20: mod_base = OTHER; note = 2'-O-methylguanosine-3'-phosphate
  modified_base 21: mod_base = OTHER; note = 2'-O-methyladenosine
atacaaccaacagccaagtga

SEQ ID NO: 3810 - RNA, 21 nt, synthetic construct
  source 1..21: mol_type = other RNA
  modified_base 1: mod_base = OTHER; note = 2'-O-methyluridine-3'-phosphate
  modified_base 2: mod_base = OTHER; note = 2'-O-methyladenosine-3'-phosphate
  modified_base 3: mod_base = OTHER; note = 2'-O-methylcytidine-3'-phosphate
  modified_base 4: mod_base = OTHER; note = 2'-O-methyladenosine-3'-phosphate
  modified_base 5: mod_base = OTHER; note = 2'-O-methyladenosine-3'-phosphate
  modified_base 6: mod_base = OTHER; note = 2'-O-methylcytidine-3'-phosphate
  modified_base 7: mod_base = OTHER; note = 2'-deoxy-2'-fluorocytidine-3'-phosphate
  modified_base 8: mod_base = OTHER; note = 2'-O-methyladenosine-3'-phosphate
  modified_base 9: mod_base = OTHER; note = 2'-deoxy-2'-fluoroadenosine-3'-phosphate
  modified_base 10: mod_base = OTHER; note = 2'-deoxy-2'-fluorocytidine-3'-phosphate
  modified_base 11: mod_base = OTHER; note = 2'-deoxy-2'-fluoroadenosine-3'-phosphate
  modified_base 12: mod_base = OTHER; note = 2'-O-methylguanosine-3'-phosphate
  modified_base 13: mod_base = OTHER; note = 2'-O-methylcytidine-3'-phosphate
  modified_base 14: mod_base = OTHER; note = 2'-O-methylcytidine-3'-phosphate
  modified_base 15: mod_base = OTHER; note = 2'-O-methyladenosine-3'-phosphate
  modified_base 16: mod_base = OTHER; note = 2'-O-methyladenosine-3'-phosphate
  modified_base 17: mod_base = OTHER; note = 2'-O-methylguanosine-3'-phosphate
  modified_base 18: mod_base = OTHER; note = 2'-O-methyluridine-3'-phosphate
  modified_base 19: mod_base = OTHER; note = 2'-O-methylguanosine-3'-phosphate
  modified_base 20: mod_base = OTHER; note = 2'-O-methylcytidine-3'-phosphate
  modified_base 21: mod_base = OTHER; note = 2'-O-methyladenosine
tacaaccaacagccaagtgca

SEQ ID NO: 3811 - RNA, 21 nt, synthetic construct
  source 1..21: mol_type = other RNA
  modified_base 1: mod_base = OTHER; note = 2'-O-methyladenosine-3'-phosphate
  modified_base 2: mod_base = OTHER; note = 2'-O-methylcytidine-3'-phosphate
  modified_base 3: mod_base = OTHER; note = 2'-O-methyladenosine-3'-phosphate
  modified_base 4: mod_base = OTHER; note = 2'-O-methyladenosine-3'-phosphate
  modified_base 5: mod_base = OTHER; note = 2'-O-methylcytidine-3'-phosphate
  modified_base 6: mod_base = OTHER; note = 2'-O-methylcytidine-3'-phosphate
  modified_base 7: mod_base = OTHER; note = 2'-deoxy-2'-fluoroadenosine-3'-phosphate
  modified_base 8: mod_base = OTHER; note = 2'-O-methyladenosine-3'-phosphate
  modified_base 9: mod_base = OTHER; note = 2'-deoxy-2'-fluorocytidine-3'-phosphate
  modified_base 10: mod_base = OTHER; note = 2'-deoxy-2'-fluoroadenosine-3'-phosphate
  modified_base 11: mod_base = OTHER; note = 2'-deoxy-2'-fluoroguanosine-3'-phosphate
  modified_base 12: mod_base = OTHER; note = 2'-O-methylcytidine-3'-phosphate
  modified_base 13: mod_base = OTHER; note = 2'-O-methylcytidine-3'-phosphate
  modified_base 14: mod_base = OTHER; note = 2'-O-methyladenosine-3'-phosphate
  modified_base 15: mod_base = OTHER; note = 2'-O-methyladenosine-3'-phosphate
  modified_base 16: mod_base = OTHER; note = 2'-O-methylguanosine-3'-phosphate
  modified_base 17: mod_base = OTHER; note = 2'-O-methyluridine-3'-phosphate
  modified_base 18: mod_base = OTHER; note = 2'-O-methylguanosine-3'-phosphate
  modified_base 19: mod_base = OTHER; note = 2'-O-methylcytidine-3'-phosphate
  modified_base 20: mod_base = OTHER; note = 2'-O-methylguanosine-3'-phosphate
  modified_base 21: mod_base = OTHER; note = 2'-O-methyladenosine
acaaccaacagccaagtgcga

SEQ ID NO: 3812 - RNA, 21 nt, synthetic construct
  source 1..21: mol_type = other RNA
  modified_base 1: mod_base = OTHER; note = 2'-O-methylguanosine-3'-phosphate
  modified_base 2: mod_base = OTHER; note = 2'-O-methylcytidine-3'-phosphate
  modified_base 3: mod_base = OTHER; note = 2'-O-methylcytidine-3'-phosphate
  modified_base 4: mod_base = OTHER; note = 2'-O-methyladenosine-3'-phosphate
  modified_base 5: mod_base = OTHER; note = 2'-O-methyladenosine-3'-phosphate
  modified_base 6: mod_base = OTHER; note = 2'-O-methylguanosine-3'-phosphate
  modified_base 7: mod_base = OTHER; note = 2'-deoxy-2'-fluorouridine-3'-phosphate
  modified_base 8: mod_base = OTHER; note = 2'-O-methylguanosine-3'-phosphate
  modified_base 9: mod_base = OTHER; note = 2'-deoxy-2'-fluorocytidine-3'-phosphate
  modified_base 10: mod_base = OTHER; note = 2'-deoxy-2'-fluoroguanosine-3'-phosphate
  modified_base 11: mod_base = OTHER; note = 2'-deoxy-2'-fluoroguanosine-3'-phosphate
  modified_base 12: mod_base = OTHER; note = 2'-O-methyluridine-3'-phosphate
  modified_base 13: mod_base = OTHER; note = 2'-O-methylguanosine-3'-phosphate
  modified_base 14: mod_base = OTHER; note = 2'-O-methylguanosine-3'-phosphate
  modified_base 15: mod_base = OTHER; note = 2'-O-methylguanosine-3'-phosphate
  modified_base 16: mod_base = OTHER; note = 2'-O-methyladenosine-3'-phosphate
  modified_base 17: mod_base = OTHER; note = 2'-O-methylguanosine-3'-phosphate
  modified_base 18: mod_base = OTHER; note = 2'-O-methyluridine-3'-phosphate
  modified_base 19: mod_base = OTHER; note = 2'-O-methyladenosine-3'-phosphate
  modified_base 20: mod_base = OTHER; note = 2'-O-methylcytidine-3'-phosphate
  modified_base 21: mod_base = OTHER; note = 2'-O-methyladenosine
gccaagtgcggtgggagtaca

SEQ ID NO: 3813 - RNA, 21 nt, synthetic construct
  source 1..21: mol_type = other RNA
  modified_base 1: mod_base = OTHER; note = 2'-O-methyladenosine-3'-phosphate
  modified_base 2: mod_base = OTHER; note = 2'-O-methyladenosine-3'-phosphate
  modified_base 3: mod_base = OTHER; note = 2'-O-methylguanosine-3'-phosphate
  modified_base 4: mod_base = OTHER; note = 2'-O-methyluridine-3'-phosphate
  modified_base 5: mod_base = OTHER; note = 2'-O-methylguanosine-3'-phosphate
  modified_base 6: mod_base = OTHER; note = 2'-O-methylcytidine-3'-phosphate
  modified_base 7: mod_base = OTHER; note = 2'-deoxy-2'-fluoroguanosine-3'-phosphate
  modified_base 8: mod_base = OTHER; note = 2'-O-methylguanosine-3'-phosphate
  modified_base 9: mod_base = OTHER; note = 2'-deoxy-2'-fluorouridine-3'-phosphate
  modified_base 10: mod_base = OTHER; note = 2'-deoxy-2'-fluoroguanosine-3'-phosphate
  modified_base 11: mod_base = OTHER; note = 2'-deoxy-2'-fluoroguanosine-3'-phosphate
  modified_base 12: mod_base = OTHER; note = 2'-O-methylguanosine-3'-phosphate
  modified_base 13: mod_base = OTHER; note = 2'-O-methyladenosine-3'-phosphate
  modified_base 14: mod_base = OTHER; note = 2'-O-methylguanosine-3'-phosphate
  modified_base 15: mod_base = OTHER; note = 2'-O-methyluridine-3'-phosphate
  modified_base 16: mod_base = OTHER; note = 2'-O-methyladenosine-3'-phosphate
  modified_base 17: mod_base = OTHER; note = 2'-O-methylcytidine-3'-phosphate
  modified_base 18: mod_base = OTHER; note = 2'-O-methyluridine-3'-phosphate
  modified_base 19: mod_base = OTHER; note = 2'-O-methylguanosine-3'-phosphate
  modified_base 20: mod_base = OTHER; note = 2'-O-methyluridine-3'-phosphate
  modified_base 21: mod_base = OTHER; note = 2'-O-methyladenosine
aagtgcggtgggagtactgta

SEQ ID NO: 3814 - RNA, 21 nt, synthetic construct
  source 1..21: mol_type = other RNA
  modified_base 1: mod_base = OTHER; note = 2'-O-methyladenosine-3'-phosphate
  modified_base 2: mod_base = OTHER; note = 2'-O-methylguanosine-3'-phosphate
  modified_base 3: mod_base = OTHER; note = 2'-O-methyluridine-3'-phosphate
  modified_base 4: mod_base = OTHER; note = 2'-O-methylguanosine-3'-phosphate
  modified_base 5: mod_base = OTHER; note = 2'-O-methylcytidine-3'-phosphate
  modified_base 6: mod_base = OTHER; note = 2'-O-methylguanosine-3'-phosphate
  modified_base 7: mod_base = OTHER; note = 2'-deoxy-2'-fluoroguanosine-3'-phosphate
  modified_base 8: mod_base = OTHER; note = 2'-O-methyluridine-3'-phosphate
  modified_base 9: mod_base = OTHER; note = 2'-deoxy-2'-fluoroguanosine-3'-phosphate
  modified_base 10: mod_base = OTHER; note = 2'-deoxy-2'-fluoroguanosine-3'-phosphate
  modified_base 11: mod_base = OTHER; note = 2'-deoxy-2'-fluoroguanosine-3'-phosphate
  modified_base 12: mod_base = OTHER; note = 2'-O-methyladenosine-3'-phosphate
  modified_base 13: mod_base = OTHER; note = 2'-O-methylguanosine-3'-phosphate
  modified_base 14: mod_base = OTHER; note = 2'-O-methyluridine-3'-phosphate
  modified_base 15: mod_base = OTHER; note = 2'-O-methyladenosine-3'-phosphate
  modified_base 16: mod_base = OTHER; note = 2'-O-methylcytidine-3'-phosphate
  modified_base 17: mod_base = OTHER; note = 2'-O-methyluridine-3'-phosphate
  modified_base 18: mod_base = OTHER; note = 2'-O-methylguanosine-3'-phosphate
  modified_base 19: mod_base = OTHER; note = 2'-O-methyluridine-3'-phosphate
  modified_base 20: mod_base = OTHER; note = 2'-O-methyladenosine-3'-phosphate
  modified_base 21: mod_base = OTHER; note = 2'-O-methyladenosine
agtgcggtgggagtactgtaa

SEQ ID NO: 3815 - RNA, 21 nt, synthetic construct
  source 1..21: mol_type = other RNA
  modified_base 1: mod_base = OTHER; note = 2'-O-methylguanosine-3'-phosphate
  modified_base 2: mod_base = OTHER; note = 2'-O-methyluridine-3'-phosphate
  modified_base 3: mod_base = OTHER; note = 2'-O-methylguanosine-3'-phosphate
  modified_base 4: mod_base = OTHER; note = 2'-O-methylcytidine-3'-phosphate
  modified_base 5: mod_base = OTHER; note = 2'-O-methylguanosine-3'-phosphate
  modified_base 6: mod_base = OTHER; note = 2'-O-methylguanosine-3'-phosphate
  modified_base 7: mod_base = OTHER; note = 2'-deoxy-2'-fluorouridine-3'-phosphate
  modified_base 8: mod_base = OTHER; note = 2'-O-methylguanosine-3'-phosphate
  modified_base 9: mod_base = OTHER; note = 2'-deoxy-2'-fluoroguanosine-3'-phosphate
  modified_base 10: mod_base = OTHER; note = 2'-deoxy-2'-fluoroguanosine-3'-phosphate
  modified_base 11: mod_base = OTHER; note = 2'-deoxy-2'-fluoroadenosine-3'-phosphate
  modified_base 12: mod_base = OTHER; note = 2'-O-methylguanosine-3'-phosphate
  modified_base 13: mod_base = OTHER; note = 2'-O-methyluridine-3'-phosphate
  modified_base 14: mod_base = OTHER; note = 2'-O-methyladenosine-3'-phosphate
  modified_base 15: mod_base = OTHER; note = 2'-O-methylcytidine-3'-phosphate
  modified_base 16: mod_base = OTHER; note = 2'-O-methyluridine-3'-phosphate
  modified_base 17: mod_base = OTHER; note = 2'-O-methylguanosine-3'-phosphate
  modified_base 18: mod_base = OTHER; note = 2'-O-methyluridine-3'-phosphate
  modified_base 19: mod_base = OTHER; note = 2'-O-methyladenosine-3'-phosphate
  modified_base 20: mod_base = OTHER; note = 2'-O-methyladenosine-3'-phosphate
  modified_base 21: mod_base = OTHER; note = 2'-O-methyladenosine
gtgcggtgggagtactgtaaa

SEQ ID NO: 3816 - RNA, 21 nt, synthetic construct
  source 1..21: mol_type = other RNA
  modified_base 1: mod_base = OTHER; note = 2'-O-methyluridine-3'-phosphate
  modified_base 2: mod_base = OTHER; note = 2'-O-methylguanosine-3'-phosphate
  modified_base 3: mod_base = OTHER; note = 2'-O-methylcytidine-3'-phosphate
  modified_base 4: mod_base = OTHER; note = 2'-O-methylguanosine-3'-phosphate
  modified_base 5: mod_base = OTHER; note = 2'-O-methylguanosine-3'-phosphate
  modified_base 6: mod_base = OTHER; note = 2'-O-methyluridine-3'-phosphate
  modified_base 7: mod_base = OTHER; note = 2'-deoxy-2'-fluoroguanosine-3'-phosphate
  modified_base 8: mod_base = OTHER; note = 2'-O-methylguanosine-3'-phosphate
  modified_base 9: mod_base = OTHER; note = 2'-deoxy-2'-fluoroguanosine-3'-phosphate
  modified_base 10: mod_base = OTHER; note = 2'-deoxy-2'-fluoroadenosine-3'-phosphate
  modified_base 11: mod_base = OTHER; note = 2'-deoxy-2'-fluoroguanosine-3'-phosphate
  modified_base 12: mod_base = OTHER; note = 2'-O-methyluridine-3'-phosphate
  modified_base 13: mod_base = OTHER; note = 2'-O-methyladenosine-3'-phosphate
  modified_base 14: mod_base = OTHER; note = 2'-O-methylcytidine-3'-phosphate
  modified_base 15: mod_base = OTHER; note = 2'-O-methyluridine-3'-phosphate
  modified_base 16: mod_base = OTHER; note = 2'-O-methylguanosine-3'-phosphate
  modified_base 17: mod_base = OTHER; note = 2'-O-methyluridine-3'-phosphate
  modified_base 18: mod_base = OTHER; note = 2'-O-methyladenosine-3'-phosphate
  modified_base 19: mod_base = OTHER; note = 2'-O-methyladenosine-3'-phosphate
  modified_base 20: mod_base = OTHER; note = 2'-O-methylguanosine-3'-phosphate
  modified_base 21: mod_base = OTHER; note = 2'-O-methyladenosine
tgcggtgggagtactgtaaga

SEQ ID NO: 3817 - RNA, 21 nt, synthetic construct
  source 1..21: mol_type = other RNA
  modified_base 1: mod_base = OTHER; note = 2'-O-methylguanosine-3'-phosphate
  modified_base 2: mod_base = OTHER; note = 2'-O-methylcytidine-3'-phosphate
  modified_base 3: mod_base = OTHER; note = 2'-O-methylguanosine-3'-phosphate
  modified_base 4: mod_base = OTHER; note = 2'-O-methylguanosine-3'-phosphate
  modified_base 5: mod_base = OTHER; note = 2'-O-methyluridine-3'-phosphate
  modified_base 6: mod_base = OTHER; note = 2'-O-methylguanosine-3'-phosphate
  modified_base 7: mod_base = OTHER; note = 2'-deoxy-2'-fluoroguanosine-3'-phosphate
  modified_base 8: mod_base = OTHER; note = 2'-O-methylguanosine-3'-phosphate
  modified_base 9: mod_base = OTHER; note = 2'-deoxy-2'-fluoroadenosine-3'-phosphate
  modified_base 10: mod_base = OTHER; note = 2'-deoxy-2'-fluoroguanosine-3'-phosphate
  modified_base 11: mod_base = OTHER; note = 2'-deoxy-2'-fluorouridine-3'-phosphate
  modified_base 12: mod_base = OTHER; note = 2'-O-methyladenosine-3'-phosphate
  modified_base 13: mod_base = OTHER; note = 2'-O-methylcytidine-3'-phosphate
  modified_base 14: mod_base = OTHER; note = 2'-O-methyluridine-3'-phosphate
  modified_base 15: mod_base = OTHER; note = 2'-O-methylguanosine-3'-phosphate
  modified_base 16: mod_base = OTHER; note = 2'-O-methyluridine-3'-phosphate
  modified_base 17: mod_base = OTHER; note = 2'-O-methyladenosine-3'-phosphate
  modified_base 18: mod_base = OTHER; note = 2'-O-methyladenosine-3'-phosphate
  modified_base 19: mod_base = OTHER; note = 2'-O-methylguanosine-3'-phosphate
  modified_base 20: mod_base = OTHER; note = 2'-O-methyladenosine-3'-phosphate
  modified_base 21: mod_base = OTHER; note = 2'-O-methyladenosine
gcggtgggagtactgtaagaa

SEQ ID NO: 3818 - RNA, 21 nt, synthetic construct
  source 1..21: mol_type = other RNA
  modified_base 1: mod_base = OTHER; note = 2'-O-methylcytidine-3'-phosphate
  modified_base 2: mod_base = OTHER; note = 2'-O-methylguanosine-3'-phosphate
  modified_base 3: mod_base = OTHER; note = 2'-O-methylguanosine-3'-phosphate
  modified_base 4: mod_base = OTHER; note = 2'-O-methyluridine-3'-phosphate
  modified_base 5: mod_base = OTHER; note = 2'-O-methylguanosine-3'-phosphate
  modified_base 6: mod_base = OTHER; note = 2'-O-methylguanosine-3'-phosphate
  modified_base 7: mod_base = OTHER; note = 2'-deoxy-2'-fluoroguanosine-3'-phosphate
  modified_base 8: mod_base = OTHER; note = 2'-O-methyladenosine-3'-phosphate
  modified_base 9: mod_base = OTHER; note = 2'-deoxy-2'-fluoroguanosine-3'-phosphate
  modified_base 10: mod_base = OTHER; note = 2'-deoxy-2'-fluorouridine-3'-phosphate
  modified_base 11: mod_base = OTHER; note = 2'-deoxy-2'-fluoroadenosine-3'-phosphate
  modified_base 12: mod_base = OTHER; note = 2'-O-methylcytidine-3'-phosphate
  modified_base 13: mod_base = OTHER; note = 2'-O-methyluridine-3'-phosphate
  modified_base 14: mod_base = OTHER; note = 2'-O-methylguanosine-3'-phosphate
  modified_base 15: mod_base = OTHER; note = 2'-O-methyluridine-3'-phosphate
  modified_base 16: mod_base = OTHER; note = 2'-O-methyladenosine-3'-phosphate
  modified_base 17: mod_base = OTHER; note = 2'-O-methyladenosine-3'-phosphate
  modified_base 18: mod_base = OTHER; note = 2'-O-methylguanosine-3'-phosphate
  modified_base 19: mod_base = OTHER; note = 2'-O-methyladenosine-3'-phosphate
  modified_base 20: mod_base = OTHER; note = 2'-O-methyluridine-3'-phosphate
  modified_base 21: mod_base = OTHER; note = 2'-O-methyladenosine
cggtgggagtactgtaagata

SEQ ID NO: 3819 - RNA, 21 nt, synthetic construct
  source 1..21: mol_type = other RNA
  modified_base 1: mod_base = OTHER; note = 2'-O-methylguanosine-3'-phosphate
  modified_base 2: mod_base = OTHER; note = 2'-O-methylguanosine-3'-phosphate
  modified_base 3: mod_base = OTHER; note = 2'-O-methyluridine-3'-phosphate
  modified_base 4: mod_base = OTHER; note = 2'-O-methylguanosine-3'-phosphate
  modified_base 5: mod_base = OTHER; note = 2'-O-methylguanosine-3'-phosphate
  modified_base 6: mod_base = OTHER; note = 2'-O-methylguanosine-3'-phosphate
  modified_base 7: mod_base = OTHER; note = 2'-deoxy-2'-fluoroadenosine-3'-phosphate
  modified_base 8: mod_base = OTHER; note = 2'-O-methylguanosine-3'-phosphate
  modified_base 9: mod_base = OTHER; note = 2'-deoxy-2'-fluorouridine-3'-phosphate
  modified_base 10: mod_base = OTHER; note = 2'-deoxy-2'-fluoroadenosine-3'-phosphate
  modified_base 11: mod_base = OTHER; note = 2'-deoxy-2'-fluorocytidine-3'-phosphate
  modified_base 12: mod_base = OTHER; note = 2'-O-methyluridine-3'-phosphate
  modified_base 13: mod_base = OTHER; note = 2'-O-methylguanosine-3'-phosphate
  modified_base 14: mod_base = OTHER; note = 2'-O-methyluridine-3'-phosphate
  modified_base 15: mod_base = OTHER; note = 2'-O-methyladenosine-3'-phosphate
  modified_base 16: mod_base = OTHER; note = 2'-O-methyladenosine-3'-phosphate
  modified_base 17: mod_base = OTHER; note = 2'-O-methylguanosine-3'-phosphate
  modified_base 18: mod_base = OTHER; note = 2'-O-methyladenosine-3'-phosphate
  modified_base 19: mod_base = OTHER; note = 2'-O-methyluridine-3'-phosphate
  modified_base 20: mod_base = OTHER; note = 2'-O-methyladenosine-3'-phosphate
  modified_base 21: mod_base = OTHER; note = 2'-O-methyladenosine
ggtgggagtactgtaagataa

SEQ ID NO: 3820 - RNA, 21 nt, synthetic construct
  source 1..21: mol_type = other RNA
  modified_base 1: mod_base = OTHER; note = 2'-O-methylguanosine-3'-phosphate
  modified_base 2: mod_base = OTHER; note = 2'-O-methyluridine-3'-phosphate
  modified_base 3: mod_base = OTHER; note = 2'-O-methylguanosine-3'-phosphate
  modified_base 4: mod_base = OTHER; note = 2'-O-methylguanosine-3'-phosphate
  modified_base 5: mod_base = OTHER; note = 2'-O-methylguanosine-3'-phosphate
  modified_base 6: mod_base = OTHER; note = 2'-O-methyladenosine-3'-phosphate
  modified_base 7: mod_base = OTHER; note = 2'-deoxy-2'-fluoroguanosine-3'-phosphate
  modified_base 8: mod_base = OTHER; note = 2'-O-methyluridine-3'-phosphate
  modified_base 9: mod_base = OTHER; note = 2'-deoxy-2'-fluoroadenosine-3'-phosphate
  modified_base 10: mod_base = OTHER; note = 2'-deoxy-2'-fluorocytidine-3'-phosphate
  modified_base 11: mod_base = OTHER; note = 2'-deoxy-2'-fluorouridine-3'-phosphate
  modified_base 12: mod_base = OTHER; note = 2'-O-methylguanosine-3'-phosphate
  modified_base 13: mod_base = OTHER; note = 2'-O-methyluridine-3'-phosphate
  modified_base 14: mod_base = OTHER; note = 2'-O-methyladenosine-3'-phosphate
  modified_base 15: mod_base = OTHER; note = 2'-O-methyladenosine-3'-phosphate
  modified_base 16: mod_base = OTHER; note = 2'-O-methylguanosine-3'-phosphate
  modified_base 17: mod_base = OTHER; note = 2'-O-methyladenosine-3'-phosphate
  modified_base 18: mod_base = OTHER; note = 2'-O-methyluridine-3'-phosphate
  modified_base 19: mod_base = OTHER; note = 2'-O-methyladenosine-3'-phosphate
  modified_base 20: mod_base = OTHER; note = 2'-O-methylcytidine-3'-phosphate
  modified_base 21: mod_base = OTHER; note = 2'-O-methyladenosine
gtgggagtactgtaagataca

SEQ ID NO: 3821 - RNA, 21 nt, synthetic construct
  source 1..21: mol_type = other RNA
  modified_base 1: mod_base = OTHER; note = 2'-O-methyluridine-3'-phosphate
  modified_base 2: mod_base = OTHER; note = 2'-O-methylguanosine-3'-phosphate
  modified_base 3: mod_base = OTHER; note = 2'-O-methylguanosine-3'-phosphate
  modified_base 4: mod_base = OTHER; note = 2'-O-methylguanosine-3'-phosphate
  modified_base 5: mod_base = OTHER; note = 2'-O-methyladenosine-3'-phosphate
  modified_base 6: mod_base = OTHER; note = 2'-O-methylguanosine-3'-phosphate
  modified_base 7: mod_base = OTHER; note = 2'-deoxy-2'-fluorouridine-3'-phosphate
  modified_base 8: mod_base = OTHER; note = 2'-O-methyladenosine-3'-phosphate
  modified_base 9: mod_base = OTHER; note = 2'-deoxy-2'-fluorocytidine-3'-phosphate
  modified_base 10: mod_base = OTHER; note = 2'-deoxy-2'-fluorouridine-3'-phosphate
  modified_base 11: mod_base = OTHER; note = 2'-deoxy-2'-fluoroguanosine-3'-phosphate
  modified_base 12: mod_base = OTHER; note = 2'-O-methyluridine-3'-phosphate
  modified_base 13: mod_base = OTHER; note = 2'-O-methyladenosine-3'-phosphate
  modified_base 14: mod_base = OTHER; note = 2'-O-methyladenosine-3'-phosphate
  modified_base 15: mod_base = OTHER; note = 2'-O-methylguanosine-3'-phosphate
  modified_base 16: mod_base = OTHER; note = 2'-O-methyladenosine-3'-phosphate
  modified_base 17: mod_base = OTHER; note = 2'-O-methyluridine-3'-phosphate
  modified_base 18: mod_base = OTHER; note = 2'-O-methyladenosine-3'-phosphate
  modified_base 19: mod_base = OTHER; note = 2'-O-methylcytidine-3'-phosphate
  modified_base 20: mod_base = OTHER; note = 2'-O-methylcytidine-3'-phosphate
  modified_base 21: mod_base = OTHER; note = 2'-O-methyladenosine
tgggagtactgtaagatacca

SEQ ID NO: 3822 - RNA, 21 nt, synthetic construct
  source 1..21: mol_type = other RNA
  modified_base 1: mod_base = OTHER; note = 2'-O-methylguanosine-3'-phosphate
  modified_base 2: mod_base = OTHER; note = 2'-O-methylguanosine-3'-phosphate
  modified_base 3: mod_base = OTHER; note = 2'-O-methyladenosine-3'-phosphate
  modified_base 4: mod_base = OTHER; note = 2'-O-methylguanosine-3'-phosphate
  modified_base 5: mod_base = OTHER; note = 2'-O-methyluridine-3'-phosphate
  modified_base 6: mod_base = OTHER; note = 2'-O-methyladenosine-3'-phosphate
  modified_base 7: mod_base = OTHER; note = 2'-deoxy-2'-fluorocytidine-3'-phosphate
  modified_base 8: mod_base = OTHER; note = 2'-O-methyluridine-3'-phosphate
  modified_base 9: mod_base = OTHER; note = 2'-deoxy-2'-fluoroguanosine-3'-phosphate
  modified_base 10: mod_base = OTHER; note = 2'-deoxy-2'-fluorouridine-3'-phosphate
  modified_base 11: mod_base = OTHER; note = 2'-deoxy-2'-fluoroadenosine-3'-phosphate
  modified_base 12: mod_base = OTHER; note = 2'-O-methyladenosine-3'-phosphate
  modified_base 13: mod_base = OTHER; note = 2'-O-methylguanosine-3'-phosphate
  modified_base 14: mod_base = OTHER; note = 2'-O-methyladenosine-3'-phosphate
  modified_base 15: mod_base = OTHER; note = 2'-O-methyluridine-3'-phosphate
  modified_base 16: mod_base = OTHER; note = 2'-O-methyladenosine-3'-phosphate
  modified_base 17: mod_base = OTHER; note = 2'-O-methylcytidine-3'-phosphate
  modified_base 18: mod_base = OTHER; note = 2'-O-methylcytidine-3'-phosphate
  modified_base 19: mod_base = OTHER; note = 2'-O-methylguanosine-3'-phosphate
  modified_base 20: mod_base = OTHER; note = 2'-O-methyluridine-3'-phosphate
  modified_base 21: mod_base = OTHER; note = 2'-O-methyladenosine
ggagtactgtaagataccgta

SEQ ID NO: 3823 - RNA, 21 nt, synthetic construct
  source 1..21: mol_type = other RNA
  modified_base 1: mod_base = OTHER; note = 2'-O-methylguanosine-3'-phosphate
  modified_base 2: mod_base = OTHER; note = 2'-O-methyladenosine-3'-phosphate
  modified_base 3: mod_base = OTHER; note = 2'-O-methylguanosine-3'-phosphate
  modified_base 4: mod_base = OTHER; note = 2'-O-methyluridine-3'-phosphate
  modified_base 5: mod_base = OTHER; note = 2'-O-methyladenosine-3'-phosphate
  modified_base 6: mod_base = OTHER; note = 2'-O-methylcytidine-3'-phosphate
  modified_base 7: mod_base = OTHER; note = 2'-deoxy-2'-fluorouridine-3'-phosphate
  modified_base 8: mod_base = OTHER; note = 2'-O-methylguanosine-3'-phosphate
  modified_base 9: mod_base = OTHER; note = 2'-deoxy-2'-fluorouridine-3'-phosphate
  modified_base 10: mod_base = OTHER; note = 2'-deoxy-2'-fluoroadenosine-3'-phosphate
  modified_base 11: mod_base = OTHER; note = 2'-deoxy-2'-fluoroadenosine-3'-phosphate
  modified_base 12: mod_base = OTHER; note = 2'-O-methylguanosine-3'-phosphate
  modified_base 13: mod_base = OTHER; note = 2'-O-methyladenosine-3'-phosphate
  modified_base 14: mod_base = OTHER; note = 2'-O-methyluridine-3'-phosphate
  modified_base 15: mod_base = OTHER; note = 2'-O-methyladenosine-3'-phosphate
  modified_base 16: mod_base = OTHER; note = 2'-O-methylcytidine-3'-phosphate
  modified_base 17: mod_base = OTHER; note = 2'-O-methylcytidine-3'-phosphate
  modified_base 18: mod_base = OTHER; note = 2'-O-methylguanosine-3'-phosphate
  modified_base 19: mod_base = OTHER; note = 2'-O-methyluridine-3'-phosphate
  modified_base 20: mod_base = OTHER; note = 2'-O-methylcytidine-3'-phosphate
  modified_base 21: mod_base = OTHER; note = 2'-O-methyladenosine
gagtactgtaagataccgtca

SEQ ID NO: 3824 - RNA, 21 nt, synthetic construct
  source 1..21: mol_type = other RNA
  modified_base 1: mod_base = OTHER; note = 2'-O-methyladenosine-3'-phosphate
  modified_base 2: mod_base = OTHER; note = 2'-O-methylguanosine-3'-phosphate
  modified_base 3: mod_base = OTHER; note = 2'-O-methyluridine-3'-phosphate
  modified_base 4: mod_base = OTHER; note = 2'-O-methyladenosine-3'-phosphate
  modified_base 5: mod_base = OTHER; note = 2'-O-methylcytidine-3'-phosphate
  modified_base 6: mod_base = OTHER; note = 2'-O-methyluridine-3'-phosphate
  modified_base 7: mod_base = OTHER; note = 2'-deoxy-2'-fluoroguanosine-3'-phosphate
  modified_base 8: mod_base = OTHER; note = 2'-O-methyluridine-3'-phosphate
  modified_base 9: mod_base = OTHER; note = 2'-deoxy-2'-fluoroadenosine-3'-phosphate
  modified_base 10: mod_base = OTHER; note = 2'-deoxy-2'-fluoroadenosine-3'-phosphate
  modified_base 11: mod_base = OTHER; note = 2'-deoxy-2'-fluoroguanosine-3'-phosphate
  modified_base 12: mod_base = OTHER; note = 2'-O-methyladenosine-3'-phosphate
  modified_base 13: mod_base = OTHER; note = 2'-O-methyluridine-3'-phosphate
  modified_base 14: mod_base = OTHER; note = 2'-O-methyladenosine-3'-phosphate
  modified_base 15: mod_base = OTHER; note = 2'-O-methylcytidine-3'-phosphate
  modified_base 16: mod_base = OTHER; note = 2'-O-methylcytidine-3'-phosphate
  modified_base 17: mod_base = OTHER; note = 2'-O-methylguanosine-3'-phosphate
  modified_base 18: mod_base = OTHER; note = 2'-O-methyluridine-3'-phosphate
  modified_base 19: mod_base = OTHER; note = 2'-O-methylcytidine-3'-phosphate
  modified_base 20: mod_base = OTHER; note = 2'-O-methylcytidine-3'-phosphate
  modified_base 21: mod_base = OTHER; note = 2'-O-methyladenosine
agtactgtaagataccgtcca

SEQ ID NO: 3825 - RNA, 21 nt, synthetic construct
  source 1..21: mol_type = other RNA
  modified_base 1: mod_base = OTHER; note = 2'-O-methyladenosine-3'-phosphate
  modified_base 2: mod_base = OTHER; note = 2'-O-methylcytidine-3'-phosphate
  modified_base 3: mod_base = OTHER; note = 2'-O-methyluridine-3'-phosphate
  modified_base 4: mod_base = OTHER; note = 2'-O-methylguanosine-3'-phosphate
  modified_base 5: mod_base = OTHER; note = 2'-O-methyluridine-3'-phosphate
  modified_base 6: mod_base = OTHER; note = 2'-O-methyladenosine-3'-phosphate
  modified_base 7: mod_base = OTHER; note = 2'-deoxy-2'-fluoroadenosine-3'-phosphate
  modified_base 8: mod_base = OTHER; note = 2'-O-methylguanosine-3'-phosphate
  modified_base 9: mod_base = OTHER; note = 2'-deoxy-2'-fluoroadenosine-3'-phosphate
  modified_base 10: mod_base = OTHER; note = 2'-deoxy-2'-fluorouridine-3'-phosphate
  modified_base 11: mod_base = OTHER; note = 2'-deoxy-2'-fluoroadenosine-3'-phosphate
  modified_base 12: mod_base = OTHER; note = 2'-O-methylcytidine-3'-phosphate
  modified_base 13: mod_base = OTHER; note = 2'-O-methylcytidine-3'-phosphate
  modified_base 14: mod_base = OTHER; note = 2'-O-methylguanosine-3'-phosphate
  modified_base 15: mod_base = OTHER; note = 2'-O-methyluridine-3'-phosphate
  modified_base 16: mod_base = OTHER; note = 2'-O-methylcytidine-3'-phosphate
  modified_base 17: mod_base = OTHER; note = 2'-O-methylcytidine-3'-phosphate
  modified_base 18: mod_base = OTHER; note = 2'-O-methyluridine-3'-phosphate
  modified_base 19: mod_base = OTHER; note = 2'-O-methylguanosine-3'-phosphate
  modified_base 20: mod_base = OTHER; note = 2'-O-methyluridine-3'-phosphate
  modified_base 21: mod_base = OTHER; note = 2'-O-methyladenosine
actgtaagataccgtcctgta

SEQ ID NO: 3826 - RNA, 21 nt, synthetic construct
  source 1..21: mol_type = other RNA
  modified_base 1: mod_base = OTHER; note = 2'-O-methylcytidine-3'-phosphate
  modified_base 2: mod_base = OTHER; note = 2'-O-methyluridine-3'-phosphate
  modified_base 3: mod_base = OTHER; note = 2'-O-methylguanosine-3'-phosphate
  modified_base 4: mod_base = OTHER; note = 2'-O-methyluridine-3'-phosphate
  modified_base 5: mod_base = OTHER; note = 2'-O-methyladenosine-3'-phosphate
  modified_base 6: mod_base = OTHER; note = 2'-O-methyladenosine-3'-phosphate
  modified_base 7: mod_base = OTHER; note = 2'-deoxy-2'-fluoroguanosine-3'-phosphate
  modified_base 8: mod_base = OTHER; note = 2'-O-methyladenosine-3'-phosphate
  modified_base 9: mod_base = OTHER; note = 2'-deoxy-2'-fluorouridine-3'-phosphate
  modified_base 10: mod_base = OTHER; note = 2'-deoxy-2'-fluoroadenosine-3'-phosphate
  modified_base 11: mod_base = OTHER; note = 2'-deoxy-2'-fluorocytidine-3'-phosphate
  modified_base 12: mod_base = OTHER; note = 2'-O-methylcytidine-3'-phosphate
  modified_base 13: mod_base = OTHER; note = 2'-O-methylguanosine-3'-phosphate
  modified_base 14: mod_base = OTHER; note = 2'-O-methyluridine-3'-phosphate
  modified_base 15: mod_base = OTHER; note = 2'-O-methylcytidine-3'-phosphate
  modified_base 16: mod_base = OTHER; note = 2'-O-methylcytidine-3'-phosphate
  modified_base 17: mod_base = OTHER; note = 2'-O-methyluridine-3'-phosphate
  modified_base 18: mod_base = OTHER; note = 2'-O-methylguanosine-3'-phosphate
  modified_base 19: mod_base = OTHER; note = 2'-O-methyluridine-3'-phosphate
  modified_base 20: mod_base = OTHER; note = 2'-O-methylguanosine-3'-phosphate
  modified_base 21: mod_base = OTHER; note = 2'-O-methyladenosine
ctgtaagataccgtcctgtga

SEQ ID NO: 3827 - RNA, 21 nt, synthetic construct
  source 1..21: mol_type = other RNA
  modified_base 1: mod_base = OTHER; note = 2'-O-methylguanosine-3'-phosphate
  modified_base 2: mod_base = OTHER; note = 2'-O-methyluridine-3'-phosphate
  modified_base 3: mod_base = OTHER; note = 2'-O-methyladenosine-3'-phosphate
  modified_base 4: mod_base = OTHER; note = 2'-O-methyladenosine-3'-phosphate
  modified_base 5: mod_base = OTHER; note = 2'-O-methylguanosine-3'-phosphate
  modified_base 6: mod_base = OTHER; note = 2'-O-methyladenosine-3'-phosphate
  modified_base 7: mod_base = OTHER; note = 2'-deoxy-2'-fluorouridine-3'-phosphate
  modified_base 8: mod_base = OTHER; note = 2'-O-methyladenosine-3'-phosphate
  modified_base 9: mod_base = OTHER; note = 2'-deoxy-2'-fluorocytidine-3'-phosphate
  modified_base 10: mod_base = OTHER; note = 2'-deoxy-2'-fluorocytidine-3'-phosphate
  modified_base 11: mod_base = OTHER; note = 2'-deoxy-2'-fluoroguanosine-3'-phosphate
  modified_base 12: mod_base = OTHER; note = 2'-O-methyluridine-3'-phosphate
  modified_base 13: mod_base = OTHER; note = 2'-O-methylcytidine-3'-phosphate
  modified_base 14: mod_base = OTHER; note = 2'-O-methylcytidine-3'-phosphate
  modified_base 15: mod_base = OTHER; note = 2'-O-methyluridine-3'-phosphate
  modified_base 16: mod_base = OTHER; note = 2'-O-methylguanosine-3'-phosphate
  modified_base 17: mod_base = OTHER; note = 2'-O-methyluridine-3'-phosphate
  modified_base 18: mod_base = OTHER; note = 2'-O-methylguanosine-3'-phosphate
  modified_base 19: mod_base = OTHER; note = 2'-O-methyladenosine-3'-phosphate
  modified_base 20: mod_base = OTHER; note = 2'-O-methylcytidine-3'-phosphate
  modified_base 21: mod_base = OTHER; note = 2'-O-methyladenosine
gtaagataccgtcctgtgaca

SEQ ID NO: 3828 - RNA, 21 nt, synthetic construct
  source 1..21: mol_type = other RNA
  modified_base 1: mod_base = OTHER; note = 2'-O-methyluridine-3'-phosphate
  modified_base 2: mod_base = OTHER; note = 2'-O-methyluridine-3'-phosphate
  modified_base 3: mod_base = OTHER; note = 2'-O-methylguanosine-3'-phosphate
  modified_base 4: mod_base = OTHER; note = 2'-O-methylguanosine-3'-phosphate
  modified_base 5: mod_base = OTHER; note = 2'-O-methylcytidine-3'-phosphate
  modified_base 6: mod_base = OTHER; note = 2'-O-methyluridine-3'-phosphate
  modified_base 7: mod_base = OTHER; note = 2'-deoxy-2'-fluorocytidine-3'-phosphate
  modified_base 8: mod_base = OTHER; note = 2'-O-methylcytidine-3'-phosphate
  modified_base 9: mod_base = OTHER; note = 2'-deoxy-2'-fluorocytidine-3'-phosphate
  modified_base 10: mod_base = OTHER; note = 2'-deoxy-2'-fluoroadenosine-3'-phosphate
  modified_base 11: mod_base = OTHER; note = 2'-deoxy-2'-fluorocytidine-3'-phosphate
  modified_base 12: mod_base = OTHER; note = 2'-O-methyladenosine-3'-phosphate
  modified_base 13: mod_base = OTHER; note = 2'-O-methylguanosine-3'-phosphate
  modified_base 14: mod_base = OTHER; note = 2'-O-methylcytidine-3'-phosphate
  modified_base 15: mod_base = OTHER; note = 2'-O-methyladenosine-3'-phosphate
  modified_base 16: mod_base = OTHER; note = 2'-O-methylcytidine-3'-phosphate
  modified_base 17: mod_base = OTHER; note = 2'-O-methylcytidine-3'-phosphate
  modified_base 18: mod_base = OTHER; note = 2'-O-methyladenosine-3'-phosphate
  modified_base 19: mod_base = OTHER; note = 2'-O-methylcytidine-3'-phosphate
  modified_base 20: mod_base = OTHER; note = 2'-O-methylcytidine-3'-phosphate
  modified_base 21: mod_base = OTHER; note = 2'-O-methyladenosine
ttggctcccacagcaccacca

SEQ ID NO: 3829 - RNA, 21 nt, synthetic construct
  source 1..21: mol_type = other RNA
  modified_base 1: mod_base = OTHER; note = 2'-O-methylguanosine-3'-phosphate
  modified_base 2: mod_base = OTHER; note = 2'-O-methylguanosine-3'-phosphate
  modified_base 3: mod_base = OTHER; note = 2'-O-methylcytidine-3'-phosphate
  modified_base 4: mod_base = OTHER; note = 2'-O-methyluridine-3'-phosphate
  modified_base 5: mod_base = OTHER; note = 2'-O-methylcytidine-3'-phosphate
  modified_base 6: mod_base = OTHER; note = 2'-O-methylcytidine-3'-phosphate
  modified_base 7: mod_base = OTHER; note = 2'-deoxy-2'-fluorocytidine-3'-phosphate
  modified_base 8: mod_base = OTHER; note = 2'-O-methyladenosine-3'-phosphate
  modified_base 9: mod_base = OTHER; note = 2'-deoxy-2'-fluorocytidine-3'-phosphate
  modified_base 10: mod_base = OTHER; note = 2'-deoxy-2'-fluoroadenosine-3'-phosphate
  modified_base 11: mod_base = OTHER; note = 2'-deoxy-2'-fluoroguanosine-3'-phosphate
  modified_base 12: mod_base = OTHER; note = 2'-O-methylcytidine-3'-phosphate
  modified_base 13: mod_base = OTHER; note = 2'-O-methyladenosine-3'-phosphate
  modified_base 14: mod_base = OTHER; note = 2'-O-methylcytidine-3'-phosphate
  modified_base 15: mod_base = OTHER; note = 2'-O-methylcytidine-3'-phosphate
  modified_base 16: mod_base = OTHER; note = 2'-O-methyladenosine-3'-phosphate
  modified_base 17: mod_base = OTHER; note = 2'-O-methylcytidine-3'-phosphate
  modified_base 18: mod_base = OTHER; note = 2'-O-methylcytidine-3'-phosphate
  modified_base 19: mod_base = OTHER; note = 2'-O-methyluridine-3'-phosphate
  modified_base 20: mod_base = OTHER; note = 2'-O-methylguanosine-3'-phosphate
  modified_base 21: mod_base = OTHER; note = 2'-O-methyladenosine
ggctcccacagcaccacctga

SEQ ID NO: 3830 - RNA, 21 nt, synthetic construct
  source 1..21: mol_type = other RNA
  modified_base 1: mod_base = OTHER; note = 2'-O-methylguanosine-3'-phosphate
  modified_base 2: mod_base = OTHER; note = 2'-O-methylcytidine-3'-phosphate
  modified_base 3: mod_base = OTHER; note = 2'-O-methyluridine-3'-phosphate
  modified_base 4: mod_base = OTHER; note = 2'-O-methylcytidine-3'-phosphate
  modified_base 5: mod_base = OTHER; note = 2'-O-methylcytidine-3'-phosphate
  modified_base 6: mod_base = OTHER; note = 2'-O-methylcytidine-3'-phosphate
  modified_base 7: mod_base = OTHER; note = 2'-deoxy-2'-fluoroadenosine-3'-phosphate
  modified_base 8: mod_base = OTHER; note = 2'-O-methylcytidine-3'-phosphate
  modified_base 9: mod_base = OTHER; note = 2'-deoxy-2'-fluoroadenosine-3'-phosphate
  modified_base 10: mod_base = OTHER; note = 2'-deoxy-2'-fluoroguanosine-3'-phosphate
  modified_base 11: mod_base = OTHER; note = 2'-deoxy-2'-fluorocytidine-3'-phosphate
  modified_base 12: mod_base = OTHER; note = 2'-O-methyladenosine-3'-phosphate
  modified_base 13: mod_base = OTHER; note = 2'-O-methylcytidine-3'-phosphate
  modified_base 14: mod_base = OTHER; note = 2'-O-methylcytidine-3'-phosphate
  modified_base 15: mod_base = OTHER; note = 2'-O-methyladenosine-3'-phosphate
  modified_base 16: mod_base = OTHER; note = 2'-O-methylcytidine-3'-phosphate
  modified_base 17: mod_base = OTHER; note = 2'-O-methylcytidine-3'-phosphate
  modified_base 18: mod_base = OTHER; note = 2'-O-methyluridine-3'-phosphate
  modified_base 19: mod_base = OTHER; note = 2'-O-methylguanosine-3'-phosphate
  modified_base 20: mod_base = OTHER; note = 2'-O-methyladenosine-3'-phosphate
  modified_base 21: mod_base = OTHER; note = 2'-O-methyladenosine
gctcccacagcaccacctgaa

SEQ ID NO: 3831 - RNA, 21 nt, synthetic construct
  source 1..21: mol_type = other RNA
  modified_base 1: mod_base = OTHER; note = 2'-O-methyladenosine-3'-phosphate
  modified_base 2: mod_base = OTHER; note = 2'-O-methylcytidine-3'-phosphate
  modified_base 3: mod_base = OTHER; note = 2'-O-methyladenosine-3'-phosphate
  modified_base 4: mod_base = OTHER; note = 2'-O-methylguanosine-3'-phosphate
  modified_base 5: mod_base = OTHER; note = 2'-O-methylcytidine-3'-phosphate
  modified_base 6: mod_base = OTHER; note = 2'-O-methyladenosine-3'-phosphate
  modified_base 7: mod_base = OTHER; note = 2'-deoxy-2'-fluorocytidine-3'-phosphate
  modified_base 8: mod_base = OTHER; note = 2'-O-methylcytidine-3'-phosphate
  modified_base 9: mod_base = OTHER; note = 2'-deoxy-2'-fluoroadenosine-3'-phosphate
  modified_base 10: mod_base = OTHER; note = 2'-deoxy-2'-fluorocytidine-3'-phosphate
  modified_base 11: mod_base = OTHER; note = 2'-deoxy-2'-fluorocytidine-3'-phosphate
  modified_base 12: mod_base = OTHER; note = 2'-O-methyluridine-3'-phosphate
  modified_base 13: mod_base = OTHER; note = 2'-O-methylguanosine-3'-phosphate
  modified_base 14: mod_base = OTHER; note = 2'-O-methyladenosine-3'-phosphate
  modified_base 15: mod_base = OTHER; note = 2'-O-methylguanosine-3'-phosphate
  modified_base 16: mod_base = OTHER; note = 2'-O-methylcytidine-3'-phosphate
  modified_base 17: mod_base = OTHER; note = 2'-O-methyluridine-3'-phosphate
  modified_base 18: mod_base = OTHER; note = 2'-O-methyladenosine-3'-phosphate
  modified_base 19: mod_base = OTHER; note = 2'-O-methyladenosine-3'-phosphate
  modified_base 20: mod_base = OTHER; note = 2'-O-methylcytidine-3'-phosphate
  modified_base 21: mod_base = OTHER; note = 2'-O-methyladenosine
acagcaccacctgagctaaca

SEQ ID NO: 3832 - RNA, 21 nt, synthetic construct
  source 1..21: mol_type = other RNA
  modified_base 1: mod_base = OTHER; note = 2'-O-methylcytidine-3'-phosphate
  modified_base 2: mod_base = OTHER; note = 2'-O-methyladenosine-3'-phosphate
  modified_base 3: mod_base = OTHER; note = 2'-O-methylguanosine-3'-phosphate
  modified_base 4: mod_base = OTHER; note = 2'-O-methylcytidine-3'-phosphate
  modified_base 5: mod_base = OTHER; note = 2'-O-methyladenosine-3'-phosphate
  modified_base 6: mod_base = OTHER; note = 2'-O-methylcytidine-3'-phosphate
  modified_base 7: mod_base = OTHER; note = 2'-deoxy-2'-fluorocytidine-3'-phosphate
  modified_base 8: mod_base = OTHER; note = 2'-O-methyladenosine-3'-phosphate
  modified_base 9: mod_base = OTHER; note = 2'-deoxy-2'-fluorocytidine-3'-phosphate
  modified_base 10: mod_base = OTHER; note = 2'-deoxy-2'-fluorocytidine-3'-phosphate
  modified_base 11: mod_base = OTHER; note = 2'-deoxy-2'-fluorouridine-3'-phosphate
  modified_base 12: mod_base = OTHER; note = 2'-O-methylguanosine-3'-phosphate
  modified_base 13: mod_base = OTHER; note = 2'-O-methyladenosine-3'-phosphate
  modified_base 14: mod_base = OTHER; note = 2'-O-methylguanosine-3'-phosphate
  modified_base 15: mod_base = OTHER; note = 2'-O-methylcytidine-3'-phosphate
  modified_base 16: mod_base = OTHER; note = 2'-O-methyluridine-3'-phosphate
  modified_base 17: mod_base = OTHER; note = 2'-O-methyladenosine-3'-phosphate
  modified_base 18: mod_base = OTHER; note = 2'-O-methyladenosine-3'-phosphate
  modified_base 19: mod_base = OTHER; note = 2'-O-methylcytidine-3'-phosphate
  modified_base 20: mod_base = OTHER; note = 2'-O-methylcytidine-3'-phosphate
  modified_base 21: mod_base = OTHER; note = 2'-O-methyladenosine
cagcaccacctgagctaacca

SEQ ID NO: 3833 - RNA, 21 nt, synthetic construct
  source 1..21: mol_type = other RNA
  modified_base 1: mod_base = OTHER; note = 2'-O-methylcytidine-3'-phosphate
  modified_base 2: mod_base = OTHER; note = 2'-O-methyladenosine-3'-phosphate
  modified_base 3: mod_base = OTHER; note = 2'-O-methyluridine-3'-phosphate
  modified_base 4: mod_base = OTHER; note = 2'-O-methylguanosine-3'-phosphate
  modified_base 5: mod_base = OTHER; note = 2'-O-methylguanosine-3'-phosphate
  modified_base 6: mod_base = OTHER; note = 2'-O-methyluridine-3'-phosphate
  modified_base 7: mod_base = OTHER; note = 2'-deoxy-2'-fluoroguanosine-3'-phosphate
  modified_base 8: mod_base = OTHER; note = 2'-O-methyladenosine-3'-phosphate
  modified_base 9: mod_base = OTHER; note = 2'-deoxy-2'-fluorouridine-3'-phosphate
  modified_base 10: mod_base = OTHER; note = 2'-deoxy-2'-fluoroguanosine-3'-phosphate
  modified_base 11: mod_base = OTHER; note = 2'-deoxy-2'-fluoroguanosine-3'-phosphate
  modified_base 12: mod_base = OTHER; note = 2'-O-methyladenosine-3'-phosphate
  modified_base 13: mod_base = OTHER; note = 2'-O-methylcytidine-3'-phosphate
  modified_base 14: mod_base = OTHER; note = 2'-O-methyladenosine-3'-phosphate
  modified_base 15: mod_base = OTHER; note = 2'-O-methylguanosine-3'-phosphate
  modified_base 16: mod_base = OTHER; note = 2'-O-methyladenosine-3'-phosphate
  modified_base 17: mod_base = OTHER; note = 2'-O-methylguanosine-3'-phosphate
  modified_base 18: mod_base = OTHER; note = 2'-O-methylcytidine-3'-phosphate
  modified_base 19: mod_base = OTHER; note = 2'-O-methyluridine-3'-phosphate
  modified_base 20: mod_base = OTHER; note = 2'-O-methyladenosine-3'-phosphate
  modified_base 21: mod_base = OTHER; note = 2'-O-methyladenosine
catggtgatggacagagctaa

SEQ ID NO: 3834 - RNA, 21 nt, synthetic construct
  source 1..21: mol_type = other RNA
  modified_base 1: mod_base = OTHER; note = 2'-O-methylguanosine-3'-phosphate
  modified_base 2: mod_base = OTHER; note = 2'-O-methyladenosine-3'-phosphate
  modified_base 3: mod_base = OTHER; note = 2'-O-methylcytidine-3'-phosphate
  modified_base 4: mod_base = OTHER; note = 2'-O-methyladenosine-3'-phosphate
  modified_base 5: mod_base = OTHER; note = 2'-O-methylguanosine-3'-phosphate
  modified_base 6: mod_base = OTHER; note = 2'-O-methyladenosine-3'-phosphate
  modified_base 7: mod_base = OTHER; note = 2'-deoxy-2'-fluoroguanosine-3'-phosphate
  modified_base 8: mod_base = OTHER; note = 2'-O-methylcytidine-3'-phosphate
  modified_base 9: mod_base = OTHER; note = 2'-deoxy-2'-fluorouridine-3'-phosphate
  modified_base 10: mod_base = OTHER; note = 2'-deoxy-2'-fluoroadenosine-3'-phosphate
  modified_base 11: mod_base = OTHER; note = 2'-deoxy-2'-fluorocytidine-3'-phosphate
  modified_base 12: mod_base = OTHER; note = 2'-O-methylcytidine-3'-phosphate
  modified_base 13: mod_base = OTHER; note = 2'-O-methylguanosine-3'-phosphate
  modified_base 14: mod_base = OTHER; note = 2'-O-methyladenosine-3'-phosphate
  modified_base 15: mod_base = OTHER; note = 2'-O-methylguanosine-3'-phosphate
  modified_base 16: mod_base = OTHER; note = 2'-O-methylguanosine-3'-phosphate
  modified_base 17: mod_base = OTHER; note = 2'-O-methylcytidine-3'-phosphate
  modified_base 18: mod_base = OTHER; note = 2'-O-methyladenosine-3'-phosphate
  modified_base 19: mod_base = OTHER; note = 2'-O-methylcytidine-3'-phosphate
  modified_base 20: mod_base = OTHER; note = 2'-O-methyladenosine-3'-phosphate
  modified_base 21: mod_base = OTHER; note = 2'-O-methyladenosine
gacagagctaccgaggcacaa

SEQ ID NO: 3835 - RNA, 21 nt, synthetic construct
  source 1..21: mol_type = other RNA
  modified_base 1: mod_base = OTHER; note = 2'-O-methyladenosine-3'-phosphate
  modified_base 2: mod_base = OTHER; note = 2'-O-methylcytidine-3'-phosphate
  modified_base 3: mod_base = OTHER; note = 2'-O-methyladenosine-3'-phosphate
  modified_base 4: mod_base = OTHER; note = 2'-O-methylguanosine-3'-phosphate
  modified_base 5: mod_base = OTHER; note = 2'-O-methyladenosine-3'-phosphate
  modified_base 6: mod_base = OTHER; note = 2'-O-methylguanosine-3'-phosphate
  modified_base 7: mod_base = OTHER; note = 2'-deoxy-2'-fluorocytidine-3'-phosphate
  modified_base 8: mod_base = OTHER; note = 2'-O-methyluridine-3'-phosphate
  modified_base 9: mod_base = OTHER; note = 2'-deoxy-2'-fluoroadenosine-3'-phosphate
  modified_base 10: mod_base = OTHER; note = 2'-deoxy-2'-fluorocytidine-3'-phosphate
  modified_base 11: mod_base = OTHER; note = 2'-deoxy-2'-fluorocytidine-3'-phosphate
  modified_base 12: mod_base = OTHER; note = 2'-O-methylguanosine-3'-phosphate
  modified_base 13: mod_base = OTHER; note = 2'-O-methyladenosine-3'-phosphate
  modified_base 14: mod_base = OTHER; note = 2'-O-methylguanosine-3'-phosphate
  modified_base 15: mod_base = OTHER; note = 2'-O-methylguanosine-3'-phosphate
  modified_base 16: mod_base = OTHER; note = 2'-O-methylcytidine-3'-phosphate
  modified_base 17: mod_base = OTHER; note = 2'-O-methyladenosine-3'-phosphate
  modified_base 18: mod_base = OTHER; note = 2'-O-methylcytidine-3'-phosphate
  modified_base 19: mod_base = OTHER; note = 2'-O-methyladenosine-3'-phosphate
  modified_base 20: mod_base = OTHER; note = 2'-O-methyluridine-3'-phosphate
  modified_base 21: mod_base = OTHER; note = 2'-O-methyladenosine
acagagctaccgaggcacata

SEQ ID NO: 3836 - RNA, 21 nt, synthetic construct
  source 1..21: mol_type = other RNA
  modified_base 1: mod_base = OTHER; note = 2'-O-methylcytidine-3'-phosphate
  modified_base 2: mod_base = OTHER; note = 2'-O-methyladenosine-3'-phosphate
  modified_base 3: mod_base = OTHER; note = 2'-O-methylguanosine-3'-phosphate
  modified_base 4: mod_base = OTHER; note = 2'-O-methyladenosine-3'-phosphate
  modified_base 5: mod_base = OTHER; note = 2'-O-methylguanosine-3'-phosphate
  modified_base 6: mod_base = OTHER; note = 2'-O-methylcytidine-3'-phosphate
  modified_base 7: mod_base = OTHER; note = 2'-deoxy-2'-fluorouridine-3'-phosphate
  modified_base 8: mod_base = OTHER; note = 2'-O-methyladenosine-3'-phosphate
  modified_base 9: mod_base = OTHER; note = 2'-deoxy-2'-fluorocytidine-3'-phosphate
  modified_base 10: mod_base = OTHER; note = 2'-deoxy-2'-fluorocytidine-3'-phosphate
  modified_base 11: mod_base = OTHER; note = 2'-deoxy-2'-fluoroguanosine-3'-phosphate
  modified_base 12: mod_base = OTHER; note = 2'-O-methyladenosine-3'-phosphate
  modified_base 13: mod_base = OTHER; note = 2'-O-methylguanosine-3'-phosphate
  modified_base 14: mod_base = OTHER; note = 2'-O-methylguanosine-3'-phosphate
  modified_base 15: mod_base = OTHER; note = 2'-O-methylcytidine-3'-phosphate
  modified_base 16: mod_base = OTHER; note = 2'-O-methyladenosine-3'-phosphate
  modified_base 17: mod_base = OTHER; note = 2'-O-methylcytidine-3'-phosphate
  modified_base 18: mod_base = OTHER; note = 2'-O-methyladenosine-3'-phosphate
  modified_base 19: mod_base = OTHER; note = 2'-O-methyluridine-3'-phosphate
  modified_base 20: mod_base = OTHER; note = 2'-O-methylcytidine-3'-phosphate
  modified_base 21: mod_base = OTHER; note = 2'-O-methyladenosine
cagagctaccgaggcacatca

SEQ ID NO: 3837 - RNA, 21 nt, synthetic construct
  source 1..21: mol_type = other RNA
  modified_base 1: mod_base = OTHER; note = 2'-O-methylguanosine-3'-phosphate
  modified_base 2: mod_base = OTHER; note = 2'-O-methyladenosine-3'-phosphate
  modified_base 3: mod_base = OTHER; note = 2'-O-methylguanosine-3'-phosphate
  modified_base 4: mod_base = OTHER; note = 2'-O-methylcytidine-3'-phosphate
  modified_base 5: mod_base = OTHER; note = 2'-O-methyluridine-3'-phosphate
  modified_base 6: mod_base = OTHER; note = 2'-O-methyladenosine-3'-phosphate
  modified_base 7: mod_base = OTHER; note = 2'-deoxy-2'-fluorocytidine-3'-phosphate
  modified_base 8: mod_base = OTHER; note = 2'-O-methylcytidine-3'-phosphate
  modified_base 9: mod_base = OTHER; note = 2'-deoxy-2'-fluoroguanosine-3'-phosphate
  modified_base 10: mod_base = OTHER; note = 2'-deoxy-2'-fluoroadenosine-3'-phosphate
  modified_base 11: mod_base = OTHER; note = 2'-deoxy-2'-fluoroguanosine-3'-phosphate
  modified_base 12: mod_base = OTHER; note = 2'-O-methylguanosine-3'-phosphate
  modified_base 13: mod_base = OTHER; note = 2'-O-methylcytidine-3'-phosphate
  modified_base 14: mod_base = OTHER; note = 2'-O-methyladenosine-3'-phosphate
  modified_base 15: mod_base = OTHER; note = 2'-O-methylcytidine-3'-phosphate
  modified_base 16: mod_base = OTHER; note = 2'-O-methyladenosine-3'-phosphate
  modified_base 17: mod_base = OTHER; note = 2'-O-methyluridine-3'-phosphate
  modified_base 18: mod_base = OTHER; note = 2'-O-methylcytidine-3'-phosphate
  modified_base 19: mod_base = OTHER; note = 2'-O-methylcytidine-3'-phosphate
  modified_base 20: mod_base = OTHER; note = 2'-O-methyluridine-3'-phosphate
  modified_base 21: mod_base = OTHER; note = 2'-O-methyladenosine
gagctaccgaggcacatccta

SEQ ID NO: 3838 - RNA, 21 nt, synthetic construct
  source 1..21: mol_type = other RNA
  modified_base 1: mod_base = OTHER; note = 2'-O-methyladenosine-3'-phosphate
  modified_base 2: mod_base = OTHER; note = 2'-O-methylcytidine-3'-phosphate
  modified_base 3: mod_base = OTHER; note = 2'-O-methylcytidine-3'-phosphate
  modified_base 4: mod_base = OTHER; note = 2'-O-methylguanosine-3'-phosphate
  modified_base 5: mod_base = OTHER; note = 2'-O-methyladenosine-3'-phosphate
  modified_base 6: mod_base = OTHER; note = 2'-O-methylguanosine-3'-phosphate
  modified_base 7: mod_base = OTHER; note = 2'-deoxy-2'-fluoroguanosine-3'-phosphate
  modified_base 8: mod_base = OTHER; note = 2'-O-methylcytidine-3'-phosphate
  modified_base 9: mod_base = OTHER; note = 2'-deoxy-2'-fluoroadenosine-3'-phosphate
  modified_base 10: mod_base = OTHER; note = 2'-deoxy-2'-fluorocytidine-3'-phosphate
  modified_base 11: mod_base = OTHER; note = 2'-deoxy-2'-fluoroadenosine-3'-phosphate
  modified_base 12: mod_base = OTHER; note = 2'-O-methyluridine-3'-phosphate
  modified_base 13: mod_base = OTHER; note = 2'-O-methylcytidine-3'-phosphate
  modified_base 14: mod_base = OTHER; note = 2'-O-methylcytidine-3'-phosphate
  modified_base 15: mod_base = OTHER; note = 2'-O-methyluridine-3'-phosphate
  modified_base 16: mod_base = OTHER; note = 2'-O-methylcytidine-3'-phosphate
  modified_base 17: mod_base = OTHER; note = 2'-O-methylcytidine-3'-phosphate
  modified_base 18: mod_base = OTHER; note = 2'-O-methyladenosine-3'-phosphate
  modified_base 19: mod_base = OTHER; note = 2'-O-methylcytidine-3'-phosphate
  modified_base 20: mod_base = OTHER; note = 2'-O-methylcytidine-3'-phosphate
  modified_base 21: mod_base = OTHER; note = 2'-O-methyladenosine
accgaggcacatcctccacca

SEQ ID NO: 3839 - RNA, 21 nt, synthetic construct
  source 1..21: mol_type = other RNA
  modified_base 1: mod_base = OTHER; note = 2'-O-methylcytidine-3'-phosphate
  modified_base 2: mod_base = OTHER; note = 2'-O-methylguanosine-3'-phosphate
  modified_base 3: mod_base = OTHER; note = 2'-O-methyladenosine-3'-phosphate
  modified_base 4: mod_base = OTHER; note = 2'-O-methylguanosine-3'-phosphate
  modified_base 5: mod_base = OTHER; note = 2'-O-methylguanosine-3'-phosphate
  modified_base 6: mod_base = OTHER; note = 2'-O-methylcytidine-3'-phosphate
  modified_base 7: mod_base = OTHER; note = 2'-deoxy-2'-fluoroadenosine-3'-phosphate
  modified_base 8: mod_base = OTHER; note = 2'-O-methylcytidine-3'-phosphate
  modified_base 9: mod_base = OTHER; note = 2'-deoxy-2'-fluoroadenosine-3'-phosphate
  modified_base 10: mod_base = OTHER; note = 2'-deoxy-2'-fluorouridine-3'-phosphate
  modified_base 11: mod_base = OTHER; note = 2'-deoxy-2'-fluorocytidine-3'-phosphate
  modified_base 12: mod_base = OTHER; note = 2'-O-methylcytidine-3'-phosphate
  modified_base 13: mod_base = OTHER; note = 2'-O-methyluridine-3'-phosphate
  modified_base 14: mod_base = OTHER; note = 2'-O-methylcytidine-3'-phosphate
  modified_base 15: mod_base = OTHER; note = 2'-O-methylcytidine-3'-phosphate
  modified_base 16: mod_base = OTHER; note = 2'-O-methyladenosine-3'-phosphate
  modified_base 17: mod_base = OTHER; note = 2'-O-methylcytidine-3'-phosphate
  modified_base 18: mod_base = OTHER; note = 2'-O-methylcytidine-3'-phosphate
  modified_base 19: mod_base = OTHER; note = 2'-O-methyladenosine-3'-phosphate
  modified_base 20: mod_base = OTHER; note = 2'-O-methylcytidine-3'-phosphate
  modified_base 21: mod_base = OTHER; note = 2'-O-methyladenosine
cgaggcacatcctccaccaca

SEQ ID NO: 3840 - RNA, 21 nt, synthetic construct
  source 1..21: mol_type = other RNA
  modified_base 1: mod_base = OTHER; note = 2'-O-methyladenosine-3'-phosphate
  modified_base 2: mod_base = OTHER; note = 2'-O-methylguanosine-3'-phosphate
  modified_base 3: mod_base = OTHER; note = 2'-O-methylguanosine-3'-phosphate
  modified_base 4: mod_base = OTHER; note = 2'-O-methylcytidine-3'-phosphate
  modified_base 5: mod_base = OTHER; note = 2'-O-methyladenosine-3'-phosphate
  modified_base 6: mod_base = OTHER; note = 2'-O-methylcytidine-3'-phosphate
  modified_base 7: mod_base = OTHER; note = 2'-deoxy-2'-fluoroadenosine-3'-phosphate
  modified_base 8: mod_base = OTHER; note = 2'-O-methyluridine-3'-phosphate
  modified_base 9: mod_base = OTHER; note = 2'-deoxy-2'-fluorocytidine-3'-phosphate
  modified_base 10: mod_base = OTHER; note = 2'-deoxy-2'-fluorocytidine-3'-phosphate
  modified_base 11: mod_base = OTHER; note = 2'-deoxy-2'-fluorouridine-3'-phosphate
  modified_base 12: mod_base = OTHER; note = 2'-O-methylcytidine-3'-phosphate
  modified_base 13: mod_base = OTHER; note = 2'-O-methylcytidine-3'-phosphate
  modified_base 14: mod_base = OTHER; note = 2'-O-methyladenosine-3'-phosphate
  modified_base 15: mod_base = OTHER; note = 2'-O-methylcytidine-3'-phosphate
  modified_base 16: mod_base = OTHER; note = 2'-O-methylcytidine-3'-phosphate
  modified_base 17: mod_base = OTHER; note = 2'-O-methyladenosine-3'-phosphate
  modified_base 18: mod_base = OTHER; note = 2'-O-methylcytidine-3'-phosphate
  modified_base 19: mod_base = OTHER; note = 2'-O-methylcytidine-3'-phosphate
  modified_base 20: mod_base = OTHER; note = 2'-O-methyladenosine-3'-phosphate
  modified_base 21: mod_base = OTHER; note = 2'-O-methyladenosine
aggcacatcctccaccaccaa

SEQ ID NO: 3841 - RNA, 21 nt, synthetic construct
  source 1..21: mol_type = other RNA
  modified_base 1: mod_base = OTHER; note = 2'-O-methylguanosine-3'-phosphate
  modified_base 2: mod_base = OTHER; note = 2'-O-methylcytidine-3'-phosphate
  modified_base 3: mod_base = OTHER; note = 2'-O-methyladenosine-3'-phosphate
  modified_base 4: mod_base = OTHER; note = 2'-O-methylcytidine-3'-phosphate
  modified_base 5: mod_base = OTHER; note = 2'-O-methyladenosine-3'-phosphate
  modified_base 6: mod_base = OTHER; note = 2'-O-methyluridine-3'-phosphate
  modified_base 7: mod_base = OTHER; note = 2'-deoxy-2'-fluorocytidine-3'-phosphate
  modified_base 8: mod_base = OTHER; note = 2'-O-methylcytidine-3'-phosphate
  modified_base 9: mod_base = OTHER; note = 2'-deoxy-2'-fluorouridine-3'-phosphate
  modified_base 10: mod_base = OTHER; note = 2'-deoxy-2'-fluorocytidine-3'-phosphate
  modified_base 11: mod_base = OTHER; note = 2'-deoxy-2'-fluorocytidine-3'-phosphate
  modified_base 12: mod_base = OTHER; note = 2'-O-methyladenosine-3'-phosphate
  modified_base 13: mod_base = OTHER; note = 2'-O-methylcytidine-3'-phosphate
  modified_base 14: mod_base = OTHER; note = 2'-O-methylcytidine-3'-phosphate
  modified_base 15: mod_base = OTHER; note = 2'-O-methyladenosine-3'-phosphate
  modified_base 16: mod_base = OTHER; note = 2'-O-methylcytidine-3'-phosphate
  modified_base 17: mod_base = OTHER; note = 2'-O-methylcytidine-3'-phosphate
  modified_base 18: mod_base = OTHER; note = 2'-O-methyladenosine-3'-phosphate
  modified_base 19: mod_base = OTHER; note = 2'-O-methylcytidine-3'-phosphate
  modified_base 20: mod_base = OTHER; note = 2'-O-methylcytidine-3'-phosphate
  modified_base 21: mod_base = OTHER; note = 2'-O-methyladenosine
gcacatcctccaccaccacca

SEQ ID NO: 3842 - RNA, 21 nt, synthetic construct
  source 1..21: mol_type = other RNA
  modified_base 1: mod_base = OTHER; note = 2'-O-methylcytidine-3'-phosphate
  modified_base 2: mod_base = OTHER; note = 2'-O-methyladenosine-3'-phosphate
  modified_base 3: mod_base = OTHER; note = 2'-O-methyluridine-3'-phosphate
  modified_base 4: mod_base = OTHER; note = 2'-O-methylcytidine-3'-phosphate
  modified_base 5: mod_base = OTHER; note = 2'-O-methylcytidine-3'-phosphate
  modified_base 6: mod_base = OTHER; note = 2'-O-methyluridine-3'-phosphate
  modified_base 7: mod_base = OTHER; note = 2'-deoxy-2'-fluorocytidine-3'-phosphate
  modified_base 8: mod_base = OTHER; note = 2'-O-methylcytidine-3'-phosphate
  modified_base 9: mod_base = OTHER; note = 2'-deoxy-2'-fluoroadenosine-3'-phosphate
  modified_base 10: mod_base = OTHER; note = 2'-deoxy-2'-fluorocytidine-3'-phosphate
  modified_base 11: mod_base = OTHER; note = 2'-deoxy-2'-fluorocytidine-3'-phosphate
  modified_base 12: mod_base = OTHER; note = 2'-O-methyladenosine-3'-phosphate
  modified_base 13: mod_base = OTHER; note = 2'-O-methylcytidine-3'-phosphate
  modified_base 14: mod_base = OTHER; note = 2'-O-methylcytidine-3'-phosphate
  modified_base 15: mod_base = OTHER; note = 2'-O-methyladenosine-3'-phosphate
  modified_base 16: mod_base = OTHER; note = 2'-O-methylcytidine-3'-phosphate
  modified_base 17: mod_base = OTHER; note = 2'-O-methylcytidine-3'-phosphate
  modified_base 18: mod_base = OTHER; note = 2'-O-methyladenosine-3'-phosphate
  modified_base 19: mod_base = OTHER; note = 2'-O-methylcytidine-3'-phosphate
  modified_base 20: mod_base = OTHER; note = 2'-O-methyladenosine-3'-phosphate
  modified_base 21: mod_base = OTHER; note = 2'-O-methyladenosine
catcctccaccaccaccacaa

SEQ ID NO: 3843 - RNA, 21 nt, synthetic construct
  source 1..21: mol_type = other RNA
  modified_base 1: mod_base = OTHER; note = 2'-O-methyladenosine-3'-phosphate
  modified_base 2: mod_base = OTHER; note = 2'-O-methyluridine-3'-phosphate
  modified_base 3: mod_base = OTHER; note = 2'-O-methylcytidine-3'-phosphate
  modified_base 4: mod_base = OTHER; note = 2'-O-methylcytidine-3'-phosphate
  modified_base 5: mod_base = OTHER; note = 2'-O-methyluridine-3'-phosphate
  modified_base 6: mod_base = OTHER; note = 2'-O-methylcytidine-3'-phosphate
  modified_base 7: mod_base = OTHER; note = 2'-deoxy-2'-fluorocytidine-3'-phosphate
  modified_base 8: mod_base = OTHER; note = 2'-O-methyladenosine-3'-phosphate
  modified_base 9: mod_base = OTHER; note = 2'-deoxy-2'-fluorocytidine-3'-phosphate
  modified_base 10: mod_base = OTHER; note = 2'-deoxy-2'-fluorocytidine-3'-phosphate
  modified_base 11: mod_base = OTHER; note = 2'-deoxy-2'-fluoroadenosine-3'-phosphate
  modified_base 12: mod_base = OTHER; note = 2'-O-methylcytidine-3'-phosphate
  modified_base 13: mod_base = OTHER; note = 2'-O-methylcytidine-3'-phosphate
  modified_base 14: mod_base = OTHER; note = 2'-O-methyladenosine-3'-phosphate
  modified_base 15: mod_base = OTHER; note = 2'-O-methylcytidine-3'-phosphate
  modified_base 16: mod_base = OTHER; note = 2'-O-methylcytidine-3'-phosphate
  modified_base 17: mod_base = OTHER; note = 2'-O-methyladenosine-3'-phosphate
  modified_base 18: mod_base = OTHER; note = 2'-O-methylcytidine-3'-phosphate
  modified_base 19: mod_base = OTHER; note = 2'-O-methyladenosine-3'-phosphate
  modified_base 20: mod_base = OTHER; note = 2'-O-methylguanosine-3'-phosphate
  modified_base 21: mod_base = OTHER; note = 2'-O-methyladenosine
atcctccaccaccaccacaga

SEQ ID NO: 3844 - RNA, 21 nt, synthetic construct
  source 1..21: mol_type = other RNA
  modified_base 1: mod_base = OTHER; note = 2'-O-methyluridine-3'-phosphate
  modified_base 2: mod_base = OTHER; note = 2'-O-methylcytidine-3'-phosphate
  modified_base 3: mod_base = OTHER; note = 2'-O-methylcytidine-3'-phosphate
  modified_base 4: mod_base = OTHER; note = 2'-O-methyluridine-3'-phosphate
  modified_base 5: mod_base = OTHER; note = 2'-O-methylcytidine-3'-phosphate
  modified_base 6: mod_base = OTHER; note = 2'-O-methylcytidine-3'-phosphate
  modified_base 7: mod_base = OTHER; note = 2'-deoxy-2'-fluoroadenosine-3'-phosphate
  modified_base 8: mod_base = OTHER; note = 2'-O-methylcytidine-3'-phosphate
  modified_base 9: mod_base = OTHER; note = 2'-deoxy-2'-fluorocytidine-3'-phosphate
  modified_base 10: mod_base = OTHER; note = 2'-deoxy-2'-fluoroadenosine-3'-phosphate
  modified_base 11: mod_base = OTHER; note = 2'-deoxy-2'-fluorocytidine-3'-phosphate
  modified_base 12: mod_base = OTHER; note = 2'-O-methylcytidine-3'-phosphate
  modified_base 13: mod_base = OTHER; note = 2'-O-methyladenosine-3'-phosphate
  modified_base 14: mod_base = OTHER; note = 2'-O-methylcytidine-3'-phosphate
  modified_base 15: mod_base = OTHER; note = 2'-O-methylcytidine-3'-phosphate
  modified_base 16: mod_base = OTHER; note = 2'-O-methyladenosine-3'-phosphate
  modified_base 17: mod_base = OTHER; note = 2'-O-methylcytidine-3'-phosphate
  modified_base 18: mod_base = OTHER; note = 2'-O-methyladenosine-3'-phosphate
  modified_base 19: mod_base = OTHER; note = 2'-O-methylguanosine-3'-phosphate
  modified_base 20: mod_base = OTHER; note = 2'-O-methylguanosine-3'-phosphate
  modified_base 21: mod_base = OTHER; note = 2'-O-methyladenosine
tcctccaccaccaccacagga

SEQ ID NO: 3845 - RNA, 21 nt, synthetic construct
  source 1..21: mol_type = other RNA
  modified_base 1: mod_base = OTHER; note = 2'-O-methylcytidine-3'-phosphate
  modified_base 2: mod_base = OTHER; note = 2'-O-methylcytidine-3'-phosphate
  modified_base 3: mod_base = OTHER; note = 2'-O-methyluridine-3'-phosphate
  modified_base 4: mod_base = OTHER; note = 2'-O-methylcytidine-3'-phosphate
  modified_base 5: mod_base = OTHER; note = 2'-O-methylcytidine-3'-phosphate
  modified_base 6: mod_base = OTHER; note = 2'-O-methyladenosine-3'-phosphate
  modified_base 7: mod_base = OTHER; note = 2'-deoxy-2'-fluorocytidine-3'-phosphate
  modified_base 8: mod_base = OTHER; note = 2'-O-methylcytidine-3'-phosphate
  modified_base 9: mod_base = OTHER; note = 2'-deoxy-2'-fluoroadenosine-3'-phosphate
  modified_base 10: mod_base = OTHER; note = 2'-deoxy-2'-fluorocytidine-3'-phosphate
  modified_base 11: mod_base = OTHER; note = 2'-deoxy-2'-fluorocytidine-3'-phosphate
  modified_base 12: mod_base = OTHER; note = 2'-O-methyladenosine-3'-phosphate
  modified_base 13: mod_base = OTHER; note = 2'-O-methylcytidine-3'-phosphate
  modified_base 14: mod_base = OTHER; note = 2'-O-methylcytidine-3'-phosphate
  modified_base 15: mod_base = OTHER; note = 2'-O-methyladenosine-3'-phosphate
  modified_base 16: mod_base = OTHER; note = 2'-O-methylcytidine-3'-phosphate
  modified_base 17: mod_base = OTHER; note = 2'-O-methyladenosine-3'-phosphate
  modified_base 18: mod_base = OTHER; note = 2'-O-methylguanosine-3'-phosphate
  modified_base 19: mod_base = OTHER; note = 2'-O-methylguanosine-3'-phosphate
  modified_base 20: mod_base = OTHER; note = 2'-O-methyladenosine-3'-phosphate
  modified_base 21: mod_base = OTHER; note = 2'-O-methyladenosine
cctccaccaccaccacaggaa

SEQ ID NO: 3846 - RNA, 21 nt, synthetic construct
  source 1..21: mol_type = other RNA
  modified_base 1: mod_base = OTHER; note = 2'-O-methylcytidine-3'-phosphate
  modified_base 2: mod_base = OTHER; note = 2'-O-methyluridine-3'-phosphate
  modified_base 3: mod_base = OTHER; note = 2'-O-methylcytidine-3'-phosphate
  modified_base 4: mod_base = OTHER; note = 2'-O-methylcytidine-3'-phosphate
  modified_base 5: mod_base = OTHER; note = 2'-O-methyladenosine-3'-phosphate
  modified_base 6: mod_base = OTHER; note = 2'-O-methylcytidine-3'-phosphate
  modified_base 7: mod_base = OTHER; note = 2'-deoxy-2'-fluorocytidine-3'-phosphate
  modified_base 8: mod_base = OTHER; note = 2'-O-methyladenosine-3'-phosphate
  modified_base 9: mod_base = OTHER; note = 2'-deoxy-2'-fluorocytidine-3'-phosphate
  modified_base 10: mod_base = OTHER; note = 2'-deoxy-2'-fluorocytidine-3'-phosphate
  modified_base 11: mod_base = OTHER; note = 2'-deoxy-2'-fluoroadenosine-3'-phosphate
  modified_base 12: mod_base = OTHER; note = 2'-O-methylcytidine-3'-phosphate
  modified_base 13: mod_base = OTHER; note = 2'-O-methylcytidine-3'-phosphate
  modified_base 14: mod_base = OTHER; note = 2'-O-methyladenosine-3'-phosphate
  modified_base 15: mod_base = OTHER; note = 2'-O-methylcytidine-3'-phosphate
  modified_base 16: mod_base = OTHER; note = 2'-O-methyladenosine-3'-phosphate
  modified_base 17: mod_base = OTHER; note = 2'-O-methylguanosine-3'-phosphate
  modified_base 18: mod_base = OTHER; note = 2'-O-methylguanosine-3'-phosphate
  modified_base 19: mod_base = OTHER; note = 2'-O-methyladenosine-3'-phosphate
  modified_base 20: mod_base = OTHER; note = 2'-O-methyladenosine-3'-phosphate
  modified_base 21: mod_base = OTHER; note = 2'-O-methyladenosine
ctccaccaccaccacaggaaa

SEQ ID NO: 3847 - RNA, 21 nt, synthetic construct
  source 1..21: mol_type = other RNA
  modified_base 1: mod_base = OTHER; note = 2'-O-methyluridine-3'-phosphate
  modified_base 2: mod_base = OTHER; note = 2'-O-methylcytidine-3'-phosphate
  modified_base 3: mod_base = OTHER; note = 2'-O-methylcytidine-3'-phosphate
  modified_base 4: mod_base = OTHER; note = 2'-O-methyladenosine-3'-phosphate
  modified_base 5: mod_base = OTHER; note = 2'-O-methylcytidine-3'-phosphate
  modified_base 6: mod_base = OTHER; note = 2'-O-methylcytidine-3'-phosphate
  modified_base 7: mod_base = OTHER; note = 2'-deoxy-2'-fluoroadenosine-3'-phosphate
  modified_base 8: mod_base = OTHER; note = 2'-O-methylcytidine-3'-phosphate
  modified_base 9: mod_base = OTHER; note = 2'-deoxy-2'-fluorocytidine-3'-phosphate
  modified_base 10: mod_base = OTHER; note = 2'-deoxy-2'-fluoroadenosine-3'-phosphate
  modified_base 11: mod_base = OTHER; note = 2'-deoxy-2'-fluorocytidine-3'-phosphate
  modified_base 12: mod_base = OTHER; note = 2'-O-methylcytidine-3'-phosphate
  modified_base 13: mod_base = OTHER; note = 2'-O-methyladenosine-3'-phosphate
  modified_base 14: mod_base = OTHER; note = 2'-O-methylcytidine-3'-phosphate
  modified_base 15: mod_base = OTHER; note = 2'-O-methyladenosine-3'-phosphate
  modified_base 16: mod_base = OTHER; note = 2'-O-methylguanosine-3'-phosphate
  modified_base 17: mod_base = OTHER; note = 2'-O-methylguanosine-3'-phosphate
  modified_base 18: mod_base = OTHER; note = 2'-O-methyladenosine-3'-phosphate
  modified_base 19: mod_base = OTHER; note = 2'-O-methyladenosine-3'-phosphate
  modified_base 20: mod_base = OTHER; note = 2'-O-methyladenosine-3'-phosphate
  modified_base 21: mod_base = OTHER; note = 2'-O-methyladenosine
tccaccaccaccacaggaaaa

SEQ ID NO: 3848 - RNA, 21 nt, synthetic construct
  source 1..21: mol_type = other RNA
  modified_base 1: mod_base = OTHER; note = 2'-O-methylcytidine-3'-phosphate
  modified_base 2: mod_base = OTHER; note = 2'-O-methylcytidine-3'-phosphate
  modified_base 3: mod_base = OTHER; note = 2'-O-methyladenosine-3'-phosphate
  modified_base 4: mod_base = OTHER; note = 2'-O-methylcytidine-3'-phosphate
  modified_base 5: mod_base = OTHER; note = 2'-O-methylcytidine-3'-phosphate
  modified_base 6: mod_base = OTHER; note = 2'-O-methyladenosine-3'-phosphate
  modified_base 7: mod_base = OTHER; note = 2'-deoxy-2'-fluorocytidine-3'-phosphate
  modified_base 8: mod_base = OTHER; note = 2'-O-methylcytidine-3'-phosphate
  modified_base 9: mod_base = OTHER; note = 2'-deoxy-2'-fluoroadenosine-3'-phosphate
  modified_base 10: mod_base = OTHER; note = 2'-deoxy-2'-fluorocytidine-3'-phosphate
  modified_base 11: mod_base = OTHER; note = 2'-deoxy-2'-fluorocytidine-3'-phosphate
  modified_base 12: mod_base = OTHER; note = 2'-O-methyladenosine-3'-phosphate
  modified_base 13: mod_base = OTHER; note = 2'-O-methylcytidine-3'-phosphate
  modified_base 14: mod_base = OTHER; note = 2'-O-methyladenosine-3'-phosphate
  modified_base 15: mod_base = OTHER; note = 2'-O-methylguanosine-3'-phosphate
  modified_base 16: mod_base = OTHER; note = 2'-O-methylguanosine-3'-phosphate
  modified_base 17: mod_base = OTHER; note = 2'-O-methyladenosine-3'-phosphate
  modified_base 18: mod_base = OTHER; note = 2'-O-methyladenosine-3'-phosphate
  modified_base 19: mod_base = OTHER; note = 2'-O-methyladenosine-3'-phosphate
  modified_base 20: mod_base = OTHER; note = 2'-O-methylguanosine-3'-phosphate
  modified_base 21: mod_base = OTHER; note = 2'-O-methyladenosine
ccaccaccaccacaggaaaga

SEQ ID NO: 3849 - RNA, 21 nt, synthetic construct
  source 1..21: mol_type = other RNA
  modified_base 1: mod_base = OTHER; note = 2'-O-methylcytidine-3'-phosphate
  modified_base 2: mod_base = OTHER; note = 2'-O-methyladenosine-3'-phosphate
  modified_base 3: mod_base = OTHER; note = 2'-O-methylcytidine-3'-phosphate
  modified_base 4: mod_base = OTHER; note = 2'-O-methylcytidine-3'-phosphate
  modified_base 5: mod_base = OTHER; note = 2'-O-methyladenosine-3'-phosphate
  modified_base 6: mod_base = OTHER; note = 2'-O-methylcytidine-3'-phosphate
  modified_base 7: mod_base = OTHER; note = 2'-deoxy-2'-fluorocytidine-3'-phosphate
  modified_base 8: mod_base = OTHER; note = 2'-O-methyladenosine-3'-phosphate
  modified_base 9: mod_base = OTHER; note = 2'-deoxy-2'-fluorocytidine-3'-phosphate
  modified_base 10: mod_base = OTHER; note = 2'-deoxy-2'-fluorocytidine-3'-phosphate
  modified_base 11: mod_base = OTHER; note = 2'-deoxy-2'-fluoroadenosine-3'-phosphate
  modified_base 12: mod_base = OTHER; note = 2'-O-methylcytidine-3'-phosphate
  modified_base 13: mod_base = OTHER; note = 2'-O-methyladenosine-3'-phosphate
  modified_base 14: mod_base = OTHER; note = 2'-O-methylguanosine-3'-phosphate
  modified_base 15: mod_base = OTHER; note = 2'-O-methylguanosine-3'-phosphate
  modified_base 16: mod_base = OTHER; note = 2'-O-methyladenosine-3'-phosphate
  modified_base 17: mod_base = OTHER; note = 2'-O-methyladenosine-3'-phosphate
  modified_base 18: mod_base = OTHER; note = 2'-O-methyladenosine-3'-phosphate
  modified_base 19: mod_base = OTHER; note = 2'-O-methylguanosine-3'-phosphate
  modified_base 20: mod_base = OTHER; note = 2'-O-methyladenosine-3'-phosphate
  modified_base 21: mod_base = OTHER; note = 2'-O-methyladenosine
caccaccaccacaggaaagaa

SEQ ID NO: 3850 - RNA, 21 nt, synthetic construct
  source 1..21: mol_type = other RNA
  modified_base 1: mod_base = OTHER; note = 2'-O-methyladenosine-3'-phosphate
  modified_base 2: mod_base = OTHER; note = 2'-O-methylcytidine-3'-phosphate
  modified_base 3: mod_base = OTHER; note = 2'-O-methylcytidine-3'-phosphate
  modified_base 4: mod_base = OTHER; note = 2'-O-methyladenosine-3'-phosphate
  modified_base 5: mod_base = OTHER; note = 2'-O-methylcytidine-3'-phosphate
  modified_base 6: mod_base = OTHER; note = 2'-O-methylcytidine-3'-phosphate
  modified_base 7: mod_base = OTHER; note = 2'-deoxy-2'-fluoroadenosine-3'-phosphate
  modified_base 8: mod_base = OTHER; note = 2'-O-methylcytidine-3'-phosphate
  modified_base 9: mod_base = OTHER; note = 2'-deoxy-2'-fluorocytidine-3'-phosphate
  modified_base 10: mod_base = OTHER; note = 2'-deoxy-2'-fluoroadenosine-3'-phosphate
  modified_base 11: mod_base = OTHER; note = 2'-deoxy-2'-fluorocytidine-3'-phosphate
  modified_base 12: mod_base = OTHER; note = 2'-O-methyladenosine-3'-phosphate
  modified_base 13: mod_base = OTHER; note = 2'-O-methylguanosine-3'-phosphate
  modified_base 14: mod_base = OTHER; note = 2'-O-methylguanosine-3'-phosphate
  modified_base 15: mod_base = OTHER; note = 2'-O-methyladenosine-3'-phosphate
  modified_base 16: mod_base = OTHER; note = 2'-O-methyladenosine-3'-phosphate
  modified_base 17: mod_base = OTHER; note = 2'-O-methyladenosine-3'-phosphate
  modified_base 18: mod_base = OTHER; note = 2'-O-methylguanosine-3'-phosphate
  modified_base 19: mod_base = OTHER; note = 2'-O-methyladenosine-3'-phosphate
  modified_base 20: mod_base = OTHER; note = 2'-O-methyladenosine-3'-phosphate
  modified_base 21: mod_base = OTHER; note = 2'-O-methyladenosine
accaccaccacaggaaagaaa

SEQ ID NO: 3851 - RNA, 21 nt, synthetic construct
  source 1..21: mol_type = other RNA
  modified_base 1: mod_base = OTHER; note = 2'-O-methylcytidine-3'-phosphate
  modified_base 2: mod_base = OTHER; note = 2'-O-methylcytidine-3'-phosphate
  modified_base 3: mod_base = OTHER; note = 2'-O-methyladenosine-3'-phosphate
  modified_base 4: mod_base = OTHER; note = 2'-O-methylcytidine-3'-phosphate
  modified_base 5: mod_base = OTHER; note = 2'-O-methylcytidine-3'-phosphate
  modified_base 6: mod_base = OTHER; note = 2'-O-methyladenosine-3'-phosphate
  modified_base 7: mod_base = OTHER; note = 2'-deoxy-2'-fluorocytidine-3'-phosphate
  modified_base 8: mod_base = OTHER; note = 2'-O-methylcytidine-3'-phosphate
  modified_base 9: mod_base = OTHER; note = 2'-deoxy-2'-fluoroadenosine-3'-phosphate
  modified_base 10: mod_base = OTHER; note = 2'-deoxy-2'-fluorocytidine-3'-phosphate
  modified_base 11: mod_base = OTHER; note = 2'-deoxy-2'-fluoroadenosine-3'-phosphate
  modified_base 12: mod_base = OTHER; note = 2'-O-methylguanosine-3'-phosphate
  modified_base 13: mod_base = OTHER; note = 2'-O-methylguanosine-3'-phosphate
  modified_base 14: mod_base = OTHER; note = 2'-O-methyladenosine-3'-phosphate
  modified_base 15: mod_base = OTHER; note = 2'-O-methyladenosine-3'-phosphate
  modified_base 16: mod_base = OTHER; note = 2'-O-methyladenosine-3'-phosphate
  modified_base 17: mod_base = OTHER; note = 2'-O-methylguanosine-3'-phosphate
  modified_base 18: mod_base = OTHER; note = 2'-O-methyladenosine-3'-phosphate
  modified_base 19: mod_base = OTHER; note = 2'-O-methyladenosine-3'-phosphate
  modified_base 20: mod_base = OTHER; note = 2'-O-methylguanosine-3'-phosphate
  modified_base 21: mod_base = OTHER; note = 2'-O-methyladenosine
ccaccaccacaggaaagaaga

SEQ ID NO: 3852 - RNA, 21 nt, synthetic construct
  source 1..21: mol_type = other RNA
  modified_base 1: mod_base = OTHER; note = 2'-O-methylcytidine-3'-phosphate
  modified_base 2: mod_base = OTHER; note = 2'-O-methyladenosine-3'-phosphate
  modified_base 3: mod_base = OTHER; note = 2'-O-methylcytidine-3'-phosphate
  modified_base 4: mod_base = OTHER; note = 2'-O-methylcytidine-3'-phosphate
  modified_base 5: mod_base = OTHER; note = 2'-O-methyladenosine-3'-phosphate
  modified_base 6: mod_base = OTHER; note = 2'-O-methylcytidine-3'-phosphate
  modified_base 7: mod_base = OTHER; note = 2'-deoxy-2'-fluorocytidine-3'-phosphate
  modified_base 8: mod_base = OTHER; note = 2'-O-methyladenosine-3'-phosphate
  modified_base 9: mod_base = OTHER; note = 2'-deoxy-2'-fluorocytidine-3'-phosphate
  modified_base 10: mod_base = OTHER; note = 2'-deoxy-2'-fluoroadenosine-3'-phosphate
  modified_base 11: mod_base = OTHER; note = 2'-deoxy-2'-fluoroguanosine-3'-phosphate
  modified_base 12: mod_base = OTHER; note = 2'-O-methylguanosine-3'-phosphate
  modified_base 13: mod_base = OTHER; note = 2'-O-methyladenosine-3'-phosphate
  modified_base 14: mod_base = OTHER; note = 2'-O-methyladenosine-3'-phosphate
  modified_base 15: mod_base = OTHER; note = 2'-O-methyladenosine-3'-phosphate
  modified_base 16: mod_base = OTHER; note = 2'-O-methylguanosine-3'-phosphate
  modified_base 17: mod_base = OTHER; note = 2'-O-methyladenosine-3'-phosphate
  modified_base 18: mod_base = OTHER; note = 2'-O-methyladenosine-3'-phosphate
  modified_base 19: mod_base = OTHER; note = 2'-O-methylguanosine-3'-phosphate
  modified_base 20: mod_base = OTHER; note = 2'-O-methyluridine-3'-phosphate
  modified_base 21: mod_base = OTHER; note = 2'-O-methyladenosine
caccaccacaggaaagaagta

SEQ ID NO: 3853 - RNA, 21 nt, synthetic construct
  source 1..21: mol_type = other RNA
  modified_base 1: mod_base = OTHER; note = 2'-O-methylcytidine-3'-phosphate
  modified_base 2: mod_base = OTHER; note = 2'-O-methylcytidine-3'-phosphate
  modified_base 3: mod_base = OTHER; note = 2'-O-methyladenosine-3'-phosphate
  modified_base 4: mod_base = OTHER; note = 2'-O-methylcytidine-3'-phosphate
  modified_base 5: mod_base = OTHER; note = 2'-O-methylcytidine-3'-phosphate
  modified_base 6: mod_base = OTHER; note = 2'-O-methyladenosine-3'-phosphate
  modified_base 7: mod_base = OTHER; note = 2'-deoxy-2'-fluorocytidine-3'-phosphate
  modified_base 8: mod_base = OTHER; note = 2'-O-methyladenosine-3'-phosphate
  modified_base 9: mod_base = OTHER; note = 2'-deoxy-2'-fluoroguanosine-3'-phosphate
  modified_base 10: mod_base = OTHER; note = 2'-deoxy-2'-fluoroguanosine-3'-phosphate
  modified_base 11: mod_base = OTHER; note = 2'-deoxy-2'-fluoroadenosine-3'-phosphate
  modified_base 12: mod_base = OTHER; note = 2'-O-methyladenosine-3'-phosphate
  modified_base 13: mod_base = OTHER; note = 2'-O-methyladenosine-3'-phosphate
  modified_base 14: mod_base = OTHER; note = 2'-O-methylguanosine-3'-phosphate
  modified_base 15: mod_base = OTHER; note = 2'-O-methyladenosine-3'-phosphate
  modified_base 16: mod_base = OTHER; note = 2'-O-methyladenosine-3'-phosphate
  modified_base 17: mod_base = OTHER; note = 2'-O-methylguanosine-3'-phosphate
  modified_base 18: mod_base = OTHER; note = 2'-O-methyluridine-3'-phosphate
  modified_base 19: mod_base = OTHER; note = 2'-O-methylguanosine-3'-phosphate
  modified_base 20: mod_base = OTHER; note = 2'-O-methyluridine-3'-phosphate
  modified_base 21: mod_base = OTHER; note = 2'-O-methyladenosine
ccaccacaggaaagaagtgta

SEQ ID NO: 3854 - RNA, 21 nt, synthetic construct
  source 1..21: mol_type = other RNA
  modified_base 1: mod_base = OTHER; note = 2'-O-methylcytidine-3'-phosphate
  modified_base 2: mod_base = OTHER; note = 2'-O-methyladenosine-3'-phosphate
  modified_base 3: mod_base = OTHER; note = 2'-O-methylcytidine-3'-phosphate
  modified_base 4: mod_base = OTHER; note = 2'-O-methylcytidine-3'-phosphate
  modified_base 5: mod_base = OTHER; note = 2'-O-methyladenosine-3'-phosphate
  modified_base 6: mod_base = OTHER; note = 2'-O-methylcytidine-3'-phosphate
  modified_base 7: mod_base = OTHER; note = 2'-deoxy-2'-fluoroadenosine-3'-phosphate
  modified_base 8: mod_base = OTHER; note = 2'-O-methylguanosine-3'-phosphate
  modified_base 9: mod_base = OTHER; note = 2'-deoxy-2'-fluoroguanosine-3'-phosphate
  modified_base 10: mod_base = OTHER; note = 2'-deoxy-2'-fluoroadenosine-3'-phosphate
  modified_base 11: mod_base = OTHER; note = 2'-deoxy-2'-fluoroadenosine-3'-phosphate
  modified_base 12: mod_base = OTHER; note = 2'-O-methyladenosine-3'-phosphate
  modified_base 13: mod_base = OTHER; note = 2'-O-methylguanosine-3'-phosphate
  modified_base 14: mod_base = OTHER; note = 2'-O-methyladenosine-3'-phosphate
  modified_base 15: mod_base = OTHER; note = 2'-O-methyladenosine-3'-phosphate
  modified_base 16: mod_base = OTHER; note = 2'-O-methylguanosine-3'-phosphate
  modified_base 17: mod_base = OTHER; note = 2'-O-methyluridine-3'-phosphate
  modified_base 18: mod_base = OTHER; note = 2'-O-methylguanosine-3'-phosphate
  modified_base 19: mod_base = OTHER; note = 2'-O-methyluridine-3'-phosphate
  modified_base 20: mod_base = OTHER; note = 2'-O-methylcytidine-3'-phosphate
  modified_base 21: mod_base = OTHER; note = 2'-O-methyladenosine
caccacaggaaagaagtgtca

SEQ ID NO: 3855 - RNA, 21 nt, synthetic construct
  source 1..21: mol_type = other RNA
  modified_base 1: mod_base = OTHER; note = 2'-O-methyladenosine-3'-phosphate
  modified_base 2: mod_base = OTHER; note = 2'-O-methylcytidine-3'-phosphate
  modified_base 3: mod_base = OTHER; note = 2'-O-methylcytidine-3'-phosphate
  modified_base 4: mod_base = OTHER; note = 2'-O-methyladenosine-3'-phosphate
  modified_base 5: mod_base = OTHER; note = 2'-O-methylcytidine-3'-phosphate
  modified_base 6: mod_base = OTHER; note = 2'-O-methyladenosine-3'-phosphate
  modified_base 7: mod_base = OTHER; note = 2'-deoxy-2'-fluoroguanosine-3'-phosphate
  modified_base 8: mod_base = OTHER; note = 2'-O-methylguanosine-3'-phosphate
  modified_base 9: mod_base = OTHER; note = 2'-deoxy-2'-fluoroadenosine-3'-phosphate
  modified_base 10: mod_base = OTHER; note = 2'-deoxy-2'-fluoroadenosine-3'-phosphate
  modified_base 11: mod_base = OTHER; note = 2'-deoxy-2'-fluoroadenosine-3'-phosphate
  modified_base 12: mod_base = OTHER; note = 2'-O-methylguanosine-3'-phosphate
  modified_base 13: mod_base = OTHER; note = 2'-O-methyladenosine-3'-phosphate
  modified_base 14: mod_base = OTHER; note = 2'-O-methyladenosine-3'-phosphate
  modified_base 15: mod_base = OTHER; note = 2'-O-methylguanosine-3'-phosphate
  modified_base 16: mod_base = OTHER; note = 2'-O-methyluridine-3'-phosphate
  modified_base 17: mod_base = OTHER; note = 2'-O-methylguanosine-3'-phosphate
  modified_base 18: mod_base = OTHER; note = 2'-O-methyluridine-3'-phosphate
  modified_base 19: mod_base = OTHER; note = 2'-O-methylcytidine-3'-phosphate
  modified_base 20: mod_base = OTHER; note = 2'-O-methyladenosine-3'-phosphate
  modified_base 21: mod_base = OTHER; note = 2'-O-methyladenosine
accacaggaaagaagtgtcaa

SEQ ID NO: 3856 - RNA, 21 nt, synthetic construct
  source 1..21: mol_type = other RNA
  modified_base 1: mod_base = OTHER; note = 2'-O-methylcytidine-3'-phosphate
  modified_base 2: mod_base = OTHER; note = 2'-O-methylcytidine-3'-phosphate
  modified_base 3: mod_base = OTHER; note = 2'-O-methyladenosine-3'-phosphate
  modified_base 4: mod_base = OTHER; note = 2'-O-methylcytidine-3'-phosphate
  modified_base 5: mod_base = OTHER; note = 2'-O-methyladenosine-3'-phosphate
  modified_base 6: mod_base = OTHER; note = 2'-O-methylguanosine-3'-phosphate
  modified_base 7: mod_base = OTHER; note = 2'-deoxy-2'-fluoroguanosine-3'-phosphate
  modified_base 8: mod_base = OTHER; note = 2'-O-methyladenosine-3'-phosphate
  modified_base 9: mod_base = OTHER; note = 2'-deoxy-2'-fluoroadenosine-3'-phosphate
  modified_base 10: mod_base = OTHER; note = 2'-deoxy-2'-fluoroadenosine-3'-phosphate
  modified_base 11: mod_base = OTHER; note = 2'-deoxy-2'-fluoroguanosine-3'-phosphate
  modified_base 12: mod_base = OTHER; note = 2'-O-methyladenosine-3'-phosphate
  modified_base 13: mod_base = OTHER; note = 2'-O-methyladenosine-3'-phosphate
  modified_base 14: mod_base = OTHER; note = 2'-O-methylguanosine-3'-phosphate
  modified_base 15: mod_base = OTHER; note = 2'-O-methyluridine-3'-phosphate
  modified_base 16: mod_base = OTHER; note = 2'-O-methylguanosine-3'-phosphate
  modified_base 17: mod_base = OTHER; note = 2'-O-methyluridine-3'-phosphate
  modified_base 18: mod_base = OTHER; note = 2'-O-methylcytidine-3'-phosphate
  modified_base 19: mod_base = OTHER; note = 2'-O-methyladenosine-3'-phosphate
  modified_base 20: mod_base = OTHER; note = 2'-O-methylguanosine-3'-phosphate
  modified_base 21: mod_base = OTHER; note = 2'-O-methyladenosine
ccacaggaaagaagtgtcaga

SEQ ID NO: 3857 - RNA, 21 nt, synthetic construct
  source 1..21: mol_type = other RNA
  modified_base 1: mod_base = OTHER; note = 2'-O-methylcytidine-3'-phosphate
  modified_base 2: mod_base = OTHER; note = 2'-O-methyladenosine-3'-phosphate
  modified_base 3: mod_base = OTHER; note = 2'-O-methylcytidine-3'-phosphate
  modified_base 4: mod_base = OTHER; note = 2'-O-methyladenosine-3'-phosphate
  modified_base 5: mod_base = OTHER; note = 2'-O-methylguanosine-3'-phosphate
  modified_base 6: mod_base = OTHER; note = 2'-O-methylguanosine-3'-phosphate
  modified_base 7: mod_base = OTHER; note = 2'-deoxy-2'-fluoroadenosine-3'-phosphate
  modified_base 8: mod_base = OTHER; note = 2'-O-methyladenosine-3'-phosphate
  modified_base 9: mod_base = OTHER; note = 2'-deoxy-2'-fluoroadenosine-3'-phosphate
  modified_base 10: mod_base = OTHER; note = 2'-deoxy-2'-fluoroguanosine-3'-phosphate
  modified_base 11: mod_base = OTHER; note = 2'-deoxy-2'-fluoroadenosine-3'-phosphate
  modified_base 12: mod_base = OTHER; note = 2'-O-methyladenosine-3'-phosphate
  modified_base 13: mod_base = OTHER; note = 2'-O-methylguanosine-3'-phosphate
  modified_base 14: mod_base = OTHER; note = 2'-O-methyluridine-3'-phosphate
  modified_base 15: mod_base = OTHER; note = 2'-O-methylguanosine-3'-phosphate
  modified_base 16: mod_base = OTHER; note = 2'-O-methyluridine-3'-phosphate
  modified_base 17: mod_base = OTHER; note = 2'-O-methylcytidine-3'-phosphate
  modified_base 18: mod_base = OTHER; note = 2'-O-methyladenosine-3'-phosphate
  modified_base 19: mod_base = OTHER; note = 2'-O-methylguanosine-3'-phosphate
  modified_base 20: mod_base = OTHER; note = 2'-O-methyluridine-3'-phosphate
  modified_base 21: mod_base = OTHER; note = 2'-O-methyladenosine
cacaggaaagaagtgtcagta

SEQ ID NO: 3858 - RNA, 21 nt, synthetic construct
  source 1..21: mol_type = other RNA
  modified_base 1: mod_base = OTHER; note = 2'-O-methyladenosine-3'-phosphate
  modified_base 2: mod_base = OTHER; note = 2'-O-methylcytidine-3'-phosphate
  modified_base 3: mod_base = OTHER; note = 2'-O-methyladenosine-3'-phosphate
  modified_base 4: mod_base = OTHER; note = 2'-O-methylguanosine-3'-phosphate
  modified_base 5: mod_base = OTHER; note = 2'-O-methylguanosine-3'-phosphate
  modified_base 6: mod_base = OTHER; note = 2'-O-methyladenosine-3'-phosphate
  modified_base 7: mod_base = OTHER; note = 2'-deoxy-2'-fluoroadenosine-3'-phosphate
  modified_base 8: mod_base = OTHER; note = 2'-O-methyladenosine-3'-phosphate
  modified_base 9: mod_base = OTHER; note = 2'-deoxy-2'-fluoroguanosine-3'-phosphate
  modified_base 10: mod_base = OTHER; note = 2'-deoxy-2'-fluoroadenosine-3'-phosphate
  modified_base 11: mod_base = OTHER; note = 2'-deoxy-2'-fluoroadenosine-3'-phosphate
  modified_base 12: mod_base = OTHER; note = 2'-O-methylguanosine-3'-phosphate
  modified_base 13: mod_base = OTHER; note = 2'-O-methyluridine-3'-phosphate
  modified_base 14: mod_base = OTHER; note = 2'-O-methylguanosine-3'-phosphate
  modified_base 15: mod_base = OTHER; note = 2'-O-methyluridine-3'-phosphate
  modified_base 16: mod_base = OTHER; note = 2'-O-methylcytidine-3'-phosphate
  modified_base 17: mod_base = OTHER; note = 2'-O-methyladenosine-3'-phosphate
  modified_base 18: mod_base = OTHER; note = 2'-O-methylguanosine-3'-phosphate
  modified_base 19: mod_base = OTHER; note = 2'-O-methyluridine-3'-phosphate
  modified_base 20: mod_base = OTHER; note = 2'-O-methylcytidine-3'-phosphate
  modified_base 21: mod_base = OTHER; note = 2'-O-methyladenosine
acaggaaagaagtgtcagtca

SEQ ID NO: 3859 - RNA, 21 nt, synthetic construct
  source 1..21: mol_type = other RNA
  modified_base 1: mod_base = OTHER; note = 2'-O-methylcytidine-3'-phosphate
  modified_base 2: mod_base = OTHER; note = 2'-O-methyladenosine-3'-phosphate
  modified_base 3: mod_base = OTHER; note = 2'-O-methylguanosine-3'-phosphate
  modified_base 4: mod_base = OTHER; note = 2'-O-methylguanosine-3'-phosphate
  modified_base 5: mod_base = OTHER; note = 2'-O-methyladenosine-3'-phosphate
  modified_base 6: mod_base = OTHER; note = 2'-O-methyladenosine-3'-phosphate
  modified_base 7: mod_base = OTHER; note = 2'-deoxy-2'-fluoroadenosine-3'-phosphate
  modified_base 8: mod_base = OTHER; note = 2'-O-methylguanosine-3'-phosphate
  modified_base 9: mod_base = OTHER; note = 2'-deoxy-2'-fluoroadenosine-3'-phosphate
  modified_base 10: mod_base = OTHER; note = 2'-deoxy-2'-fluoroadenosine-3'-phosphate
  modified_base 11: mod_base = OTHER; note = 2'-deoxy-2'-fluoroguanosine-3'-phosphate
  modified_base 12: mod_base = OTHER; note = 2'-O-methyluridine-3'-phosphate
  modified_base 13: mod_base = OTHER; note = 2'-O-methylguanosine-3'-phosphate
  modified_base 14: mod_base = OTHER; note = 2'-O-methyluridine-3'-phosphate
  modified_base 15: mod_base = OTHER; note = 2'-O-methylcytidine-3'-phosphate
  modified_base 16: mod_base = OTHER; note = 2'-O-methyladenosine-3'-phosphate
  modified_base 17: mod_base = OTHER; note = 2'-O-methylguanosine-3'-phosphate
  modified_base 18: mod_base = OTHER; note = 2'-O-methyluridine-3'-phosphate
  modified_base 19: mod_base = OTHER; note = 2'-O-methylcytidine-3'-phosphate
  modified_base 20: mod_base = OTHER; note = 2'-O-methyluridine-3'-phosphate
  modified_base 21: mod_base = OTHER; note = 2'-O-methyladenosine
caggaaagaagtgtcagtcta

SEQ ID NO: 3860 - RNA, 21 nt, synthetic construct
  source 1..21: mol_type = other RNA
  modified_base 1: mod_base = OTHER; note = 2'-O-methyladenosine-3'-phosphate
  modified_base 2: mod_base = OTHER; note = 2'-O-methylguanosine-3'-phosphate
  modified_base 3: mod_base = OTHER; note = 2'-O-methylguanosine-3'-phosphate
  modified_base 4: mod_base = OTHER; note = 2'-O-methyladenosine-3'-phosphate
  modified_base 5: mod_base = OTHER; note = 2'-O-methyladenosine-3'-phosphate
  modified_base 6: mod_base = OTHER; note = 2'-O-methyladenosine-3'-phosphate
  modified_base 7: mod_base = OTHER; note = 2'-deoxy-2'-fluoroguanosine-3'-phosphate
  modified_base 8: mod_base = OTHER; note = 2'-O-methyladenosine-3'-phosphate
  modified_base 9: mod_base = OTHER; note = 2'-deoxy-2'-fluoroadenosine-3'-phosphate
  modified_base 10: mod_base = OTHER; note = 2'-deoxy-2'-fluoroguanosine-3'-phosphate
  modified_base 11: mod_base = OTHER; note = 2'-deoxy-2'-fluorouridine-3'-phosphate
  modified_base 12: mod_base = OTHER; note = 2'-O-methylguanosine-3'-phosphate
  modified_base 13: mod_base = OTHER; note = 2'-O-methyluridine-3'-phosphate
  modified_base 14: mod_base = OTHER; note = 2'-O-methylcytidine-3'-phosphate
  modified_base 15: mod_base = OTHER; note = 2'-O-methyladenosine-3'-phosphate
  modified_base 16: mod_base = OTHER; note = 2'-O-methylguanosine-3'-phosphate
  modified_base 17: mod_base = OTHER; note = 2'-O-methyluridine-3'-phosphate
  modified_base 18: mod_base = OTHER; note = 2'-O-methylcytidine-3'-phosphate
  modified_base 19: mod_base = OTHER; note = 2'-O-methyluridine-3'-phosphate
  modified_base 20: mod_base = OTHER; note = 2'-O-methyluridine-3'-phosphate
  modified_base 21: mod_base = OTHER; note = 2'-O-methyladenosine
aggaaagaagtgtcagtctta

SEQ ID NO: 3861 - RNA, 21 nt, synthetic construct
  source 1..21: mol_type = other RNA
  modified_base 1: mod_base = OTHER; note = 2'-O-methylguanosine-3'-phosphate
  modified_base 2: mod_base = OTHER; note = 2'-O-methylguanosine-3'-phosphate
  modified_base 3: mod_base = OTHER; note = 2'-O-methyladenosine-3'-phosphate
  modified_base 4: mod_base = OTHER; note = 2'-O-methyladenosine-3'-phosphate
  modified_base 5: mod_base = OTHER; note = 2'-O-methyladenosine-3'-phosphate
  modified_base 6: mod_base = OTHER; note = 2'-O-methylguanosine-3'-phosphate
  modified_base 7: mod_base = OTHER; note = 2'-deoxy-2'-fluoroadenosine-3'-phosphate
  modified_base 8: mod_base = OTHER; note = 2'-O-methyladenosine-3'-phosphate
  modified_base 9: mod_base = OTHER; note = 2'-deoxy-2'-fluoroguanosine-3'-phosphate
  modified_base 10: mod_base = OTHER; note = 2'-deoxy-2'-fluorouridine-3'-phosphate
  modified_base 11: mod_base = OTHER; note = 2'-deoxy-2'-fluoroguanosine-3'-phosphate
  modified_base 12: mod_base = OTHER; note = 2'-O-methyluridine-3'-phosphate
  modified_base 13: mod_base = OTHER; note = 2'-O-methylcytidine-3'-phosphate
  modified_base 14: mod_base = OTHER; note = 2'-O-methyladenosine-3'-phosphate
  modified_base 15: mod_base = OTHER; note = 2'-O-methylguanosine-3'-phosphate
  modified_base 16: mod_base = OTHER; note = 2'-O-methyluridine-3'-phosphate
  modified_base 17: mod_base = OTHER; note = 2'-O-methylcytidine-3'-phosphate
  modified_base 18: mod_base = OTHER; note = 2'-O-methyluridine-3'-phosphate
  modified_base 19: mod_base = OTHER; note = 2'-O-methyluridine-3'-phosphate
  modified_base 20: mod_base = OTHER; note = 2'-O-methylguanosine-3'-phosphate
  modified_base 21: mod_base = OTHER; note = 2'-O-methyladenosine
ggaaagaagtgtcagtcttga

SEQ ID NO: 3862 - RNA, 21 nt, synthetic construct
  source 1..21: mol_type = other RNA
  modified_base 1: mod_base = OTHER; note = 2'-O-methylguanosine-3'-phosphate
  modified_base 2: mod_base = OTHER; note = 2'-O-methyladenosine-3'-phosphate
  modified_base 3: mod_base = OTHER; note = 2'-O-methyladenosine-3'-phosphate
  modified_base 4: mod_base = OTHER; note = 2'-O-methyladenosine-3'-phosphate
  modified_base 5: mod_base = OTHER; note = 2'-O-methylguanosine-3'-phosphate
  modified_base 6: mod_base = OTHER; note = 2'-O-methyladenosine-3'-phosphate
  modified_base 7: mod_base = OTHER; note = 2'-deoxy-2'-fluoroadenosine-3'-phosphate
  modified_base 8: mod_base = OTHER; note = 2'-O-methylguanosine-3'-phosphate
  modified_base 9: mod_base = OTHER; note = 2'-deoxy-2'-fluorouridine-3'-phosphate
  modified_base 10: mod_base = OTHER; note = 2'-deoxy-2'-fluoroguanosine-3'-phosphate
  modified_base 11: mod_base = OTHER; note = 2'-deoxy-2'-fluorouridine-3'-phosphate
  modified_base 12: mod_base = OTHER; note = 2'-O-methylcytidine-3'-phosphate
  modified_base 13: mod_base = OTHER; note = 2'-O-methyladenosine-3'-phosphate
  modified_base 14: mod_base = OTHER; note = 2'-O-methylguanosine-3'-phosphate
  modified_base 15: mod_base = OTHER; note = 2'-O-methyluridine-3'-phosphate
  modified_base 16: mod_base = OTHER; note = 2'-O-methylcytidine-3'-phosphate
  modified_base 17: mod_base = OTHER; note = 2'-O-methyluridine-3'-phosphate
  modified_base 18: mod_base = OTHER; note = 2'-O-methyluridine-3'-phosphate
  modified_base 19: mod_base = OTHER; note = 2'-O-methylguanosine-3'-phosphate
  modified_base 20: mod_base = OTHER; note = 2'-O-methylguanosine-3'-phosphate
  modified_base 21: mod_base = OTHER; note = 2'-O-methyladenosine
gaaagaagtgtcagtcttgga

SEQ ID NO: 3863 - RNA, 21 nt, synthetic construct
  source 1..21: mol_type = other RNA
  modified_base 1: mod_base = OTHER; note = 2'-O-methyladenosine-3'-phosphate
  modified_base 2: mod_base = OTHER; note = 2'-O-methyladenosine-3'-phosphate
  modified_base 3: mod_base = OTHER; note = 2'-O-methyladenosine-3'-phosphate
  modified_base 4: mod_base = OTHER; note = 2'-O-methylguanosine-3'-phosphate
  modified_base 5: mod_base = OTHER; note = 2'-O-methyladenosine-3'-phosphate
  modified_base 6: mod_base = OTHER; note = 2'-O-methyladenosine-3'-phosphate
  modified_base 7: mod_base = OTHER; note = 2'-deoxy-2'-fluoroguanosine-3'-phosphate
  modified_base 8: mod_base = OTHER; note = 2'-O-methyluridine-3'-phosphate
  modified_base 9: mod_base = OTHER; note = 2'-deoxy-2'-fluoroguanosine-3'-phosphate
  modified_base 10: mod_base = OTHER; note = 2'-deoxy-2'-fluorouridine-3'-phosphate
  modified_base 11: mod_base = OTHER; note = 2'-deoxy-2'-fluorocytidine-3'-phosphate
  modified_base 12: mod_base = OTHER; note = 2'-O-methyladenosine-3'-phosphate
  modified_base 13: mod_base = OTHER; note = 2'-O-methylguanosine-3'-phosphate
  modified_base 14: mod_base = OTHER; note = 2'-O-methyluridine-3'-phosphate
  modified_base 15: mod_base = OTHER; note = 2'-O-methylcytidine-3'-phosphate
  modified_base 16: mod_base = OTHER; note = 2'-O-methyluridine-3'-phosphate
  modified_base 17: mod_base = OTHER; note = 2'-O-methyluridine-3'-phosphate
  modified_base 18: mod_base = OTHER; note = 2'-O-methylguanosine-3'-phosphate
  modified_base 19: mod_base = OTHER; note = 2'-O-methylguanosine-3'-phosphate
  modified_base 20: mod_base = OTHER; note = 2'-O-methyluridine-3'-phosphate
  modified_base 21: mod_base = OTHER; note = 2'-O-methyladenosine
aaagaagtgtcagtcttggta

SEQ ID NO: 3864 - RNA, 21 nt, synthetic construct
  source 1..21: mol_type = other RNA
  modified_base 1: mod_base = OTHER; note = 2'-O-methyladenosine-3'-phosphate
  modified_base 2: mod_base = OTHER; note = 2'-O-methylguanosine-3'-phosphate
  modified_base 3: mod_base = OTHER; note = 2'-O-methyladenosine-3'-phosphate
  modified_base 4: mod_base = OTHER; note = 2'-O-methyladenosine-3'-phosphate
  modified_base 5: mod_base = OTHER; note = 2'-O-methylguanosine-3'-phosphate
  modified_base 6: mod_base = OTHER; note = 2'-O-methyluridine-3'-phosphate
  modified_base 7: mod_base = OTHER; note = 2'-deoxy-2'-fluoroguanosine-3'-phosphate
  modified_base 8: mod_base = OTHER; note = 2'-O-methyluridine-3'-phosphate
  modified_base 9: mod_base = OTHER; note = 2'-deoxy-2'-fluorocytidine-3'-phosphate
  modified_base 10: mod_base = OTHER; note = 2'-deoxy-2'-fluoroadenosine-3'-phosphate
  modified_base 11: mod_base = OTHER; note = 2'-deoxy-2'-fluoroguanosine-3'-phosphate
  modified_base 12: mod_base = OTHER; note = 2'-O-methyluridine-3'-phosphate
  modified_base 13: mod_base = OTHER; note = 2'-O-methylcytidine-3'-phosphate
  modified_base 14: mod_base = OTHER; note = 2'-O-methyluridine-3'-phosphate
  modified_base 15: mod_base = OTHER; note = 2'-O-methyluridine-3'-phosphate
  modified_base 16: mod_base = OTHER; note = 2'-O-methylguanosine-3'-phosphate
  modified_base 17: mod_base = OTHER; note = 2'-O-methylguanosine-3'-phosphate
  modified_base 18: mod_base = OTHER; note = 2'-O-methyluridine-3'-phosphate
  modified_base 19: mod_base = OTHER; note = 2'-O-methylcytidine-3'-phosphate
  modified_base 20: mod_base = OTHER; note = 2'-O-methyladenosine-3'-phosphate
  modified_base 21: mod_base = OTHER; note = 2'-O-methyladenosine
agaagtgtcagtcttggtcaa

SEQ ID NO: 3865 - RNA, 21 nt, synthetic construct
  source 1..21: mol_type = other RNA
  modified_base 1: mod_base = OTHER; note = 2'-O-methylguanosine-3'-phosphate
  modified_base 2: mod_base = OTHER; note = 2'-O-methyladenosine-3'-phosphate
  modified_base 3: mod_base = OTHER; note = 2'-O-methyladenosine-3'-phosphate
  modified_base 4: mod_base = OTHER; note = 2'-O-methylguanosine-3'-phosphate
  modified_base 5: mod_base = OTHER; note = 2'-O-methyluridine-3'-phosphate
  modified_base 6: mod_base = OTHER; note = 2'-O-methylguanosine-3'-phosphate
  modified_base 7: mod_base = OTHER; note = 2'-deoxy-2'-fluorouridine-3'-phosphate
  modified_base 8: mod_base = OTHER; note = 2'-O-methylcytidine-3'-phosphate
  modified_base 9: mod_base = OTHER; note = 2'-deoxy-2'-fluoroadenosine-3'-phosphate
  modified_base 10: mod_base = OTHER; note = 2'-deoxy-2'-fluoroguanosine-3'-phosphate
  modified_base 11: mod_base = OTHER; note = 2'-deoxy-2'-fluorouridine-3'-phosphate
  modified_base 12: mod_base = OTHER; note = 2'-O-methylcytidine-3'-phosphate
  modified_base 13: mod_base = OTHER; note = 2'-O-methyluridine-3'-phosphate
  modified_base 14: mod_base = OTHER; note = 2'-O-methyluridine-3'-phosphate
  modified_base 15: mod_base = OTHER; note = 2'-O-methylguanosine-3'-phosphate
  modified_base 16: mod_base = OTHER; note = 2'-O-methylguanosine-3'-phosphate
  modified_base 17: mod_base = OTHER; note = 2'-O-methyluridine-3'-phosphate
  modified_base 18: mod_base = OTHER; note = 2'-O-methylcytidine-3'-phosphate
  modified_base 19: mod_base = OTHER; note = 2'-O-methyladenosine-3'-phosphate
  modified_base 20: mod_base = OTHER; note = 2'-O-methyluridine-3'-phosphate
  modified_base 21: mod_base = OTHER; note = 2'-O-methyladenosine
gaagtgtcagtcttggtcata

SEQ ID NO: 3866 - RNA, 21 nt, synthetic construct
  source 1..21: mol_type = other RNA
  modified_base 1: mod_base = OTHER; note = 2'-O-methyladenosine-3'-phosphate
  modified_base 2: mod_base = OTHER; note = 2'-O-methyladenosine-3'-phosphate
  modified_base 3: mod_base = OTHER; note = 2'-O-methylguanosine-3'-phosphate
  modified_base 4: mod_base = OTHER; note = 2'-O-methyluridine-3'-phosphate
  modified_base 5: mod_base = OTHER; note = 2'-O-methylguanosine-3'-phosphate
  modified_base 6: mod_base = OTHER; note = 2'-O-methyluridine-3'-phosphate
  modified_base 7: mod_base = OTHER; note = 2'-deoxy-2'-fluorocytidine-3'-phosphate
  modified_base 8: mod_base = OTHER; note = 2'-O-methyladenosine-3'-phosphate
  modified_base 9: mod_base = OTHER; note = 2'-deoxy-2'-fluoroguanosine-3'-phosphate
  modified_base 10: mod_base = OTHER; note = 2'-deoxy-2'-fluorouridine-3'-phosphate
  modified_base 11: mod_base = OTHER; note = 2'-deoxy-2'-fluorocytidine-3'-phosphate
  modified_base 12: mod_base = OTHER; note = 2'-O-methyluridine-3'-phosphate
  modified_base 13: mod_base = OTHER; note = 2'-O-methyluridine-3'-phosphate
  modified_base 14: mod_base = OTHER; note = 2'-O-methylguanosine-3'-phosphate
  modified_base 15: mod_base = OTHER; note = 2'-O-methylguanosine-3'-phosphate
  modified_base 16: mod_base = OTHER; note = 2'-O-methyluridine-3'-phosphate
  modified_base 17: mod_base = OTHER; note = 2'-O-methylcytidine-3'-phosphate
  modified_base 18: mod_base = OTHER; note = 2'-O-methyladenosine-3'-phosphate
  modified_base 19: mod_base = OTHER; note = 2'-O-methyluridine-3'-phosphate
  modified_base 20: mod_base = OTHER; note = 2'-O-methylcytidine-3'-phosphate
  modified_base 21: mod_base = OTHER; note = 2'-O-methyladenosine
aagtgtcagtcttggtcatca

SEQ ID NO: 3867 - RNA, 21 nt, synthetic construct
  source 1..21: mol_type = other RNA
  modified_base 1: mod_base = OTHER; note = 2'-O-methyladenosine-3'-phosphate
  modified_base 2: mod_base = OTHER; note = 2'-O-methylguanosine-3'-phosphate
  modified_base 3: mod_base = OTHER; note = 2'-O-methyluridine-3'-phosphate
  modified_base 4: mod_base = OTHER; note = 2'-O-methylguanosine-3'-phosphate
  modified_base 5: mod_base = OTHER; note = 2'-O-methyluridine-3'-phosphate
  modified_base 6: mod_base = OTHER; note = 2'-O-methylcytidine-3'-phosphate
  modified_base 7: mod_base = OTHER; note = 2'-deoxy-2'-fluoroadenosine-3'-phosphate
  modified_base 8: mod_base = OTHER; note = 2'-O-methylguanosine-3'-phosphate
  modified_base 9: mod_base = OTHER; note = 2'-deoxy-2'-fluorouridine-3'-phosphate
  modified_base 10: mod_base = OTHER; note = 2'-deoxy-2'-fluorocytidine-3'-phosphate
  modified_base 11: mod_base = OTHER; note = 2'-deoxy-2'-fluorouridine-3'-phosphate
  modified_base 12: mod_base = OTHER; note = 2'-O-methyluridine-3'-phosphate
  modified_base 13: mod_base = OTHER; note = 2'-O-methylguanosine-3'-phosphate
  modified_base 14: mod_base = OTHER; note = 2'-O-methylguanosine-3'-phosphate
  modified_base 15: mod_base = OTHER; note = 2'-O-methyluridine-3'-phosphate
  modified_base 16: mod_base = OTHER; note = 2'-O-methylcytidine-3'-phosphate
  modified_base 17: mod_base = OTHER; note = 2'-O-methyladenosine-3'-phosphate
  modified_base 18: mod_base = OTHER; note = 2'-O-methyluridine-3'-phosphate
  modified_base 19: mod_base = OTHER; note = 2'-O-methylcytidine-3'-phosphate
  modified_base 20: mod_base = OTHER; note = 2'-O-methyluridine-3'-phosphate
  modified_base 21: mod_base = OTHER; note = 2'-O-methyladenosine
agtgtcagtcttggtcatcta

SEQ ID NO: 3868 - RNA, 21 nt, synthetic construct
  source 1..21: mol_type = other RNA
  modified_base 1: mod_base = OTHER; note = 2'-O-methylguanosine-3'-phosphate
  modified_base 2: mod_base = OTHER; note = 2'-O-methyluridine-3'-phosphate
  modified_base 3: mod_base = OTHER; note = 2'-O-methylguanosine-3'-phosphate
  modified_base 4: mod_base = OTHER; note = 2'-O-methyluridine-3'-phosphate
  modified_base 5: mod_base = OTHER; note = 2'-O-methylcytidine-3'-phosphate
  modified_base 6: mod_base = OTHER; note = 2'-O-methyladenosine-3'-phosphate
  modified_base 7: mod_base = OTHER; note = 2'-deoxy-2'-fluoroguanosine-3'-phosphate
  modified_base 8: mod_base = OTHER; note = 2'-O-methyluridine-3'-phosphate
  modified_base 9: mod_base = OTHER; note = 2'-deoxy-2'-fluorocytidine-3'-phosphate
  modified_base 10: mod_base = OTHER; note = 2'-deoxy-2'-fluorouridine-3'-phosphate
  modified_base 11: mod_base = OTHER; note = 2'-deoxy-2'-fluorouridine-3'-phosphate
  modified_base 12: mod_base = OTHER; note = 2'-O-methylguanosine-3'-phosphate
  modified_base 13: mod_base = OTHER; note = 2'-O-methylguanosine-3'-phosphate
  modified_base 14: mod_base = OTHER; note = 2'-O-methyluridine-3'-phosphate
  modified_base 15: mod_base = OTHER; note = 2'-O-methylcytidine-3'-phosphate
  modified_base 16: mod_base = OTHER; note = 2'-O-methyladenosine-3'-phosphate
  modified_base 17: mod_base = OTHER; note = 2'-O-methyluridine-3'-phosphate
  modified_base 18: mod_base = OTHER; note = 2'-O-methylcytidine-3'-phosphate
  modified_base 19: mod_base = OTHER; note = 2'-O-methyluridine-3'-phosphate
  modified_base 20: mod_base = OTHER; note = 2'-O-methyladenosine-3'-phosphate
  modified_base 21: mod_base = OTHER; note = 2'-O-methyladenosine
gtgtcagtcttggtcatctaa

SEQ ID NO: 3869 - RNA, 21 nt, synthetic construct
  source 1..21: mol_type = other RNA
  modified_base 1: mod_base = OTHER; note = 2'-O-methyluridine-3'-phosphate
  modified_base 2: mod_base = OTHER; note = 2'-O-methylguanosine-3'-phosphate
  modified_base 3: mod_base = OTHER; note = 2'-O-methyluridine-3'-phosphate
  modified_base 4: mod_base = OTHER; note = 2'-O-methylcytidine-3'-phosphate
  modified_base 5: mod_base = OTHER; note = 2'-O-methyladenosine-3'-phosphate
  modified_base 6: mod_base = OTHER; note = 2'-O-methylguanosine-3'-phosphate
  modified_base 7: mod_base = OTHER; note = 2'-deoxy-2'-fluorouridine-3'-phosphate
  modified_base 8: mod_base = OTHER; note = 2'-O-methylcytidine-3'-phosphate
  modified_base 9: mod_base = OTHER; note = 2'-deoxy-2'-fluorouridine-3'-phosphate
  modified_base 10: mod_base = OTHER; note = 2'-deoxy-2'-fluorouridine-3'-phosphate
  modified_base 11: mod_base = OTHER; note = 2'-deoxy-2'-fluoroguanosine-3'-phosphate
  modified_base 12: mod_base = OTHER; note = 2'-O-methylguanosine-3'-phosphate
  modified_base 13: mod_base = OTHER; note = 2'-O-methyluridine-3'-phosphate
  modified_base 14: mod_base = OTHER; note = 2'-O-methylcytidine-3'-phosphate
  modified_base 15: mod_base = OTHER; note = 2'-O-methyladenosine-3'-phosphate
  modified_base 16: mod_base = OTHER; note = 2'-O-methyluridine-3'-phosphate
  modified_base 17: mod_base = OTHER; note = 2'-O-methylcytidine-3'-phosphate
  modified_base 18: mod_base = OTHER; note = 2'-O-methyluridine-3'-phosphate
  modified_base 19: mod_base = OTHER; note = 2'-O-methyladenosine-3'-phosphate
  modified_base 20: mod_base = OTHER; note = 2'-O-methyluridine-3'-phosphate
  modified_base 21: mod_base = OTHER; note = 2'-O-methyladenosine
tgtcagtcttggtcatctata

SEQ ID NO: 3870 - RNA, 21 nt, synthetic construct
  source 1..21: mol_type = other RNA
  modified_base 1: mod_base = OTHER; note = 2'-O-methylguanosine-3'-phosphate
  modified_base 2: mod_base = OTHER; note = 2'-O-methyluridine-3'-phosphate
  modified_base 3: mod_base = OTHER; note = 2'-O-methylcytidine-3'-phosphate
  modified_base 4: mod_base = OTHER; note = 2'-O-methyladenosine-3'-phosphate
  modified_base 5: mod_base = OTHER; note = 2'-O-methylguanosine-3'-phosphate
  modified_base 6: mod_base = OTHER; note = 2'-O-methyluridine-3'-phosphate
  modified_base 7: mod_base = OTHER; note = 2'-deoxy-2'-fluorocytidine-3'-phosphate
  modified_base 8: mod_base = OTHER; note = 2'-O-methyluridine-3'-phosphate
  modified_base 9: mod_base = OTHER; note = 2'-deoxy-2'-fluorouridine-3'-phosphate
  modified_base 10: mod_base = OTHER; note = 2'-deoxy-2'-fluoroguanosine-3'-phosphate
  modified_base 11: mod_base = OTHER; note = 2'-deoxy-2'-fluoroguanosine-3'-phosphate
  modified_base 12: mod_base = OTHER; note = 2'-O-methyluridine-3'-phosphate
  modified_base 13: mod_base = OTHER; note = 2'-O-methylcytidine-3'-phosphate
  modified_base 14: mod_base = OTHER; note = 2'-O-methyladenosine-3'-phosphate
  modified_base 15: mod_base = OTHER; note = 2'-O-methyluridine-3'-phosphate
  modified_base 16: mod_base = OTHER; note = 2'-O-methylcytidine-3'-phosphate
  modified_base 17: mod_base = OTHER; note = 2'-O-methyluridine-3'-phosphate
  modified_base 18: mod_base = OTHER; note = 2'-O-methyladenosine-3'-phosphate
  modified_base 19: mod_base = OTHER; note = 2'-O-methyluridine-3'-phosphate
  modified_base 20: mod_base = OTHER; note = 2'-O-methylguanosine-3'-phosphate
  modified_base 21: mod_base = OTHER; note = 2'-O-methyladenosine
gtcagtcttggtcatctatga

SEQ ID NO: 3871 - RNA, 21 nt, synthetic construct
  source 1..21: mol_type = other RNA
  modified_base 1: mod_base = OTHER; note = 2'-O-methyluridine-3'-phosphate
  modified_base 2: mod_base = OTHER; note = 2'-O-methylcytidine-3'-phosphate
  modified_base 3: mod_base = OTHER; note = 2'-O-methyladenosine-3'-phosphate
  modified_base 4: mod_base = OTHER; note = 2'-O-methylguanosine-3'-phosphate
  modified_base 5: mod_base = OTHER; note = 2'-O-methyluridine-3'-phosphate
  modified_base 6: mod_base = OTHER; note = 2'-O-methylcytidine-3'-phosphate
  modified_base 7: mod_base = OTHER; note = 2'-deoxy-2'-fluorouridine-3'-phosphate
  modified_base 8: mod_base = OTHER; note = 2'-O-methyluridine-3'-phosphate
  modified_base 9: mod_base = OTHER; note = 2'-deoxy-2'-fluoroguanosine-3'-phosphate
  modified_base 10: mod_base = OTHER; note = 2'-deoxy-2'-fluoroguanosine-3'-phosphate
  modified_base 11: mod_base = OTHER; note = 2'-deoxy-2'-fluorouridine-3'-phosphate
  modified_base 12: mod_base = OTHER; note = 2'-O-methylcytidine-3'-phosphate
  modified_base 13: mod_base = OTHER; note = 2'-O-methyladenosine-3'-phosphate
  modified_base 14: mod_base = OTHER; note = 2'-O-methyluridine-3'-phosphate
  modified_base 15: mod_base = OTHER; note = 2'-O-methylcytidine-3'-phosphate
  modified_base 16: mod_base = OTHER; note = 2'-O-methyluridine-3'-phosphate
  modified_base 17: mod_base = OTHER; note = 2'-O-methyladenosine-3'-phosphate
  modified_base 18: mod_base = OTHER; note = 2'-O-methyluridine-3'-phosphate
  modified_base 19: mod_base = OTHER; note = 2'-O-methylguanosine-3'-phosphate
  modified_base 20: mod_base = OTHER; note = 2'-O-methyladenosine-3'-phosphate
  modified_base 21: mod_base = OTHER; note = 2'-O-methyladenosine
tcagtcttggtcatctatgaa

SEQ ID NO: 3872 - RNA, 21 nt, synthetic construct
  source 1..21: mol_type = other RNA
  modified_base 1: mod_base = OTHER; note = 2'-O-methylcytidine-3'-phosphate
  modified_base 2: mod_base = OTHER; note = 2'-O-methyladenosine-3'-phosphate
  modified_base 3: mod_base = OTHER; note = 2'-O-methylguanosine-3'-phosphate
  modified_base 4: mod_base = OTHER; note = 2'-O-methyluridine-3'-phosphate
  modified_base 5: mod_base = OTHER; note = 2'-O-methylcytidine-3'-phosphate
  modified_base 6: mod_base = OTHER; note = 2'-O-methyluridine-3'-phosphate
  modified_base 7: mod_base = OTHER; note = 2'-deoxy-2'-fluorouridine-3'-phosphate
  modified_base 8: mod_base = OTHER; note = 2'-O-methylguanosine-3'-phosphate
  modified_base 9: mod_base = OTHER; note = 2'-deoxy-2'-fluoroguanosine-3'-phosphate
  modified_base 10: mod_base = OTHER; note = 2'-deoxy-2'-fluorouridine-3'-phosphate
  modified_base 11: mod_base = OTHER; note = 2'-deoxy-2'-fluorocytidine-3'-phosphate
  modified_base 12: mod_base = OTHER; note = 2'-O-methyladenosine-3'-phosphate
  modified_base 13: mod_base = OTHER; note = 2'-O-methyluridine-3'-phosphate
  modified_base 14: mod_base = OTHER; note = 2'-O-methylcytidine-3'-phosphate
  modified_base 15: mod_base = OTHER; note = 2'-O-methyluridine-3'-phosphate
  modified_base 16: mod_base = OTHER; note = 2'-O-methyladenosine-3'-phosphate
  modified_base 17: mod_base = OTHER; note = 2'-O-methyluridine-3'-phosphate
  modified_base 18: mod_base = OTHER; note = 2'-O-methylguanosine-3'-phosphate
  modified_base 19: mod_base = OTHER; note = 2'-O-methyladenosine-3'-phosphate
  modified_base 20: mod_base = OTHER; note = 2'-O-methylcytidine-3'-phosphate
  modified_base 21: mod_base = OTHER; note = 2'-O-methyladenosine
cagtcttggtcatctatgaca

SEQ ID NO: 3873 - RNA, 21 nt, synthetic construct
  source 1..21: mol_type = other RNA
  modified_base 1: mod_base = OTHER; note = 2'-O-methyladenosine-3'-phosphate
  modified_base 2: mod_base = OTHER; note = 2'-O-methylguanosine-3'-phosphate
  modified_base 3: mod_base = OTHER; note = 2'-O-methyluridine-3'-phosphate
  modified_base 4: mod_base = OTHER; note = 2'-O-methylcytidine-3'-phosphate
  modified_base 5: mod_base = OTHER; note = 2'-O-methyluridine-3'-phosphate
  modified_base 6: mod_base = OTHER; note = 2'-O-methyluridine-3'-phosphate
  modified_base 7: mod_base = OTHER; note = 2'-deoxy-2'-fluoroguanosine-3'-phosphate
  modified_base 8: mod_base = OTHER; note = 2'-O-methylguanosine-3'-phosphate
  modified_base 9: mod_base = OTHER; note = 2'-deoxy-2'-fluorouridine-3'-phosphate
  modified_base 10: mod_base = OTHER; note = 2'-deoxy-2'-fluorocytidine-3'-phosphate
  modified_base 11: mod_base = OTHER; note = 2'-deoxy-2'-fluoroadenosine-3'-phosphate
  modified_base 12: mod_base = OTHER; note = 2'-O-methyluridine-3'-phosphate
  modified_base 13: mod_base = OTHER; note = 2'-O-methylcytidine-3'-phosphate
  modified_base 14: mod_base = OTHER; note = 2'-O-methyluridine-3'-phosphate
  modified_base 15: mod_base = OTHER; note = 2'-O-methyladenosine-3'-phosphate
  modified_base 16: mod_base = OTHER; note = 2'-O-methyluridine-3'-phosphate
  modified_base 17: mod_base = OTHER; note = 2'-O-methylguanosine-3'-phosphate
  modified_base 18: mod_base = OTHER; note = 2'-O-methyladenosine-3'-phosphate
  modified_base 19: mod_base = OTHER; note = 2'-O-methylcytidine-3'-phosphate
  modified_base 20: mod_base = OTHER; note = 2'-O-methyladenosine-3'-phosphate
  modified_base 21: mod_base = OTHER; note = 2'-O-methyladenosine
agtcttggtcatctatgacaa

SEQ ID NO: 3874 - RNA, 21 nt, synthetic construct
  source 1..21: mol_type = other RNA
  modified_base 1: mod_base = OTHER; note = 2'-O-methylguanosine-3'-phosphate
  modified_base 2: mod_base = OTHER; note = 2'-O-methylguanosine-3'-phosphate
  modified_base 3: mod_base = OTHER; note = 2'-O-methyladenosine-3'-phosphate
  modified_base 4: mod_base = OTHER; note = 2'-O-methyladenosine-3'-phosphate
  modified_base 5: mod_base = OTHER; note = 2'-O-methyluridine-3'-phosphate
  modified_base 6: mod_base = OTHER; note = 2'-O-methylcytidine-3'-phosphate
  modified_base 7: mod_base = OTHER; note = 2'-deoxy-2'-fluorocytidine-3'-phosphate
  modified_base 8: mod_base = OTHER; note = 2'-O-methyladenosine-3'-phosphate
  modified_base 9: mod_base = OTHER; note = 2'-deoxy-2'-fluoroguanosine-3'-phosphate
  modified_base 10: mod_base = OTHER; note = 2'-deoxy-2'-fluoroadenosine-3'-phosphate
  modified_base 11: mod_base = OTHER; note = 2'-deoxy-2'-fluorouridine-3'-phosphate
  modified_base 12: mod_base = OTHER; note = 2'-O-methylguanosine-3'-phosphate
  modified_base 13: mod_base = OTHER; note = 2'-O-methylcytidine-3'-phosphate
  modified_base 14: mod_base = OTHER; note = 2'-O-methylcytidine-3'-phosphate
  modified_base 15: mod_base = OTHER; note = 2'-O-methylguanosine-3'-phosphate
  modified_base 16: mod_base = OTHER; note = 2'-O-methyladenosine-3'-phosphate
  modified_base 17: mod_base = OTHER; note = 2'-O-methyluridine-3'-phosphate
  modified_base 18: mod_base = OTHER; note = 2'-O-methyladenosine-3'-phosphate
  modified_base 19: mod_base = OTHER; note = 2'-O-methyladenosine-3'-phosphate
  modified_base 20: mod_base = OTHER; note = 2'-O-methyladenosine-3'-phosphate
  modified_base 21: mod_base = OTHER; note = 2'-O-methyladenosine
ggaatccagatgccgataaaa

SEQ ID NO: 3875 - RNA, 21 nt, synthetic construct
  source 1..21: mol_type = other RNA
  modified_base 1: mod_base = OTHER; note = 2'-O-methylguanosine-3'-phosphate
  modified_base 2: mod_base = OTHER; note = 2'-O-methyladenosine-3'-phosphate
  modified_base 3: mod_base = OTHER; note = 2'-O-methyladenosine-3'-phosphate
  modified_base 4: mod_base = OTHER; note = 2'-O-methyluridine-3'-phosphate
  modified_base 5: mod_base = OTHER; note = 2'-O-methylcytidine-3'-phosphate
  modified_base 6: mod_base = OTHER; note = 2'-O-methylcytidine-3'-phosphate
  modified_base 7: mod_base = OTHER; note = 2'-deoxy-2'-fluoroadenosine-3'-phosphate
  modified_base 8: mod_base = OTHER; note = 2'-O-methylguanosine-3'-phosphate
  modified_base 9: mod_base = OTHER; note = 2'-deoxy-2'-fluoroadenosine-3'-phosphate
  modified_base 10: mod_base = OTHER; note = 2'-deoxy-2'-fluorouridine-3'-phosphate
  modified_base 11: mod_base = OTHER; note = 2'-deoxy-2'-fluoroguanosine-3'-phosphate
  modified_base 12: mod_base = OTHER; note = 2'-O-methylcytidine-3'-phosphate
  modified_base 13: mod_base = OTHER; note = 2'-O-methylcytidine-3'-phosphate
  modified_base 14: mod_base = OTHER; note = 2'-O-methylguanosine-3'-phosphate
  modified_base 15: mod_base = OTHER; note = 2'-O-methyladenosine-3'-phosphate
  modified_base 16: mod_base = OTHER; note = 2'-O-methyluridine-3'-phosphate
  modified_base 17: mod_base = OTHER; note = 2'-O-methyladenosine-3'-phosphate
  modified_base 18: mod_base = OTHER; note = 2'-O-methyladenosine-3'-phosphate
  modified_base 19: mod_base = OTHER; note = 2'-O-methyladenosine-3'-phosphate
  modified_base 20: mod_base = OTHER; note = 2'-O-methylguanosine-3'-phosphate
  modified_base 21: mod_base = OTHER; note = 2'-O-methyladenosine
gaatccagatgccgataaaga

SEQ ID NO: 3876 - RNA, 21 nt, synthetic construct
  source 1..21: mol_type = other RNA
  modified_base 1: mod_base = OTHER; note = 2'-O-methylguanosine-3'-phosphate
  modified_base 2: mod_base = OTHER; note = 2'-O-methylguanosine-3'-phosphate
  modified_base 3: mod_base = OTHER; note = 2'-O-methyluridine-3'-phosphate
  modified_base 4: mod_base = OTHER; note = 2'-O-methylguanosine-3'-phosphate
  modified_base 5: mod_base = OTHER; note = 2'-O-methylguanosine-3'-phosphate
  modified_base 6: mod_base = OTHER; note = 2'-O-methylguanosine-3'-phosphate
  modified_base 7: mod_base = OTHER; note = 2'-deoxy-2'-fluoroadenosine-3'-phosphate
  modified_base 8: mod_base = OTHER; note = 2'-O-methylguanosine-3'-phosphate
  modified_base 9: mod_base = OTHER; note = 2'-deoxy-2'-fluorouridine-3'-phosphate
  modified_base 10: mod_base = OTHER; note = 2'-deoxy-2'-fluoroadenosine-3'-phosphate
  modified_base 11: mod_base = OTHER; note = 2'-deoxy-2'-fluorocytidine-3'-phosphate
  modified_base 12: mod_base = OTHER; note = 2'-O-methyluridine-3'-phosphate
  modified_base 13: mod_base = OTHER; note = 2'-O-methylguanosine-3'-phosphate
  modified_base 14: mod_base = OTHER; note = 2'-O-methylcytidine-3'-phosphate
  modified_base 15: mod_base = OTHER; note = 2'-O-methyladenosine-3'-phosphate
  modified_base 16: mod_base = OTHER; note = 2'-O-methyladenosine-3'-phosphate
  modified_base 17: mod_base = OTHER; note = 2'-O-methylcytidine-3'-phosphate
  modified_base 18: mod_base = OTHER; note = 2'-O-methylcytidine-3'-phosphate
  modified_base 19: mod_base = OTHER; note = 2'-O-methyluridine-3'-phosphate
  modified_base 20: mod_base = OTHER; note = 2'-O-methylguanosine-3'-phosphate
  modified_base 21: mod_base = OTHER; note = 2'-O-methyladenosine
ggtgggagtactgcaacctga

SEQ ID NO: 3877 - RNA, 21 nt, synthetic construct
  source 1..21: mol_type = other RNA
  modified_base 1: mod_base = OTHER; note = 2'-O-methylguanosine-3'-phosphate
  modified_base 2: mod_base = OTHER; note = 2'-O-methyluridine-3'-phosphate
  modified_base 3: mod_base = OTHER; note = 2'-O-methylguanosine-3'-phosphate
  modified_base 4: mod_base = OTHER; note = 2'-O-methylguanosine-3'-phosphate
  modified_base 5: mod_base = OTHER; note = 2'-O-methylguanosine-3'-phosphate
  modified_base 6: mod_base = OTHER; note = 2'-O-methyladenosine-3'-phosphate
  modified_base 7: mod_base = OTHER; note = 2'-deoxy-2'-fluoroguanosine-3'-phosphate
  modified_base 8: mod_base = OTHER; note = 2'-O-methyluridine-3'-phosphate
  modified_base 9: mod_base = OTHER; note = 2'-deoxy-2'-fluoroadenosine-3'-phosphate
  modified_base 10: mod_base = OTHER; note = 2'-deoxy-2'-fluorocytidine-3'-phosphate
  modified_base 11: mod_base = OTHER; note = 2'-deoxy-2'-fluorouridine-3'-phosphate
  modified_base 12: mod_base = OTHER; note = 2'-O-methylguanosine-3'-phosphate
  modified_base 13: mod_base = OTHER; note = 2'-O-methylcytidine-3'-phosphate
  modified_base 14: mod_base = OTHER; note = 2'-O-methyladenosine-3'-phosphate
  modified_base 15: mod_base = OTHER; note = 2'-O-methyladenosine-3'-phosphate
  modified_base 16: mod_base = OTHER; note = 2'-O-methylcytidine-3'-phosphate
  modified_base 17: mod_base = OTHER; note = 2'-O-methylcytidine-3'-phosphate
  modified_base 18: mod_base = OTHER; note = 2'-O-methyluridine-3'-phosphate
  modified_base 19: mod_base = OTHER; note = 2'-O-methylguanosine-3'-phosphate
  modified_base 20: mod_base = OTHER; note = 2'-O-methyladenosine-3'-phosphate
  modified_base 21: mod_base = OTHER; note = 2'-O-methyladenosine
gtgggagtactgcaacctgaa

SEQ ID NO: 3878 - RNA, 21 nt, synthetic construct
  source 1..21: mol_type = other RNA
  modified_base 1: mod_base = OTHER; note = 2'-O-methyluridine-3'-phosphate
  modified_base 2: mod_base = OTHER; note = 2'-O-methylguanosine-3'-phosphate
  modified_base 3: mod_base = OTHER; note = 2'-O-methylguanosine-3'-phosphate
  modified_base 4: mod_base = OTHER; note = 2'-O-methylguanosine-3'-phosphate
  modified_base 5: mod_base = OTHER; note = 2'-O-methyladenosine-3'-phosphate
  modified_base 6: mod_base = OTHER; note = 2'-O-methylguanosine-3'-phosphate
  modified_base 7: mod_base = OTHER; note = 2'-deoxy-2'-fluorouridine-3'-phosphate
  modified_base 8: mod_base = OTHER; note = 2'-O-methyladenosine-3'-phosphate
  modified_base 9: mod_base = OTHER; note = 2'-deoxy-2'-fluorocytidine-3'-phosphate
  modified_base 10: mod_base = OTHER; note = 2'-deoxy-2'-fluorouridine-3'-phosphate
  modified_base 11: mod_base = OTHER; note = 2'-deoxy-2'-fluoroguanosine-3'-phosphate
  modified_base 12: mod_base = OTHER; note = 2'-O-methylcytidine-3'-phosphate
  modified_base 13: mod_base = OTHER; note = 2'-O-methyladenosine-3'-phosphate
  modified_base 14: mod_base = OTHER; note = 2'-O-methyladenosine-3'-phosphate
  modified_base 15: mod_base = OTHER; note = 2'-O-methylcytidine-3'-phosphate
  modified_base 16: mod_base = OTHER; note = 2'-O-methylcytidine-3'-phosphate
  modified_base 17: mod_base = OTHER; note = 2'-O-methyluridine-3'-phosphate
  modified_base 18: mod_base = OTHER; note = 2'-O-methylguanosine-3'-phosphate
  modified_base 19: mod_base = OTHER; note = 2'-O-methyladenosine-3'-phosphate
  modified_base 20: mod_base = OTHER; note = 2'-O-methyladenosine-3'-phosphate
  modified_base 21: mod_base = OTHER; note = 2'-O-methyladenosine
tgggagtactgcaacctgaaa

SEQ ID NO: 3879 - RNA, 21 nt, synthetic construct
  source 1..21: mol_type = other RNA
  modified_base 1: mod_base = OTHER; note = 2'-O-methylguanosine-3'-phosphate
  modified_base 2: mod_base = OTHER; note = 2'-O-methylguanosine-3'-phosphate
  modified_base 3: mod_base = OTHER; note = 2'-O-methylguanosine-3'-phosphate
  modified_base 4: mod_base = OTHER; note = 2'-O-methyladenosine-3'-phosphate
  modified_base 5: mod_base = OTHER; note = 2'-O-methylguanosine-3'-phosphate
  modified_base 6: mod_base = OTHER; note = 2'-O-methyluridine-3'-phosphate
  modified_base 7: mod_base = OTHER; note = 2'-deoxy-2'-fluoroadenosine-3'-phosphate
  modified_base 8: mod_base = OTHER; note = 2'-O-methylcytidine-3'-phosphate
  modified_base 9: mod_base = OTHER; note = 2'-deoxy-2'-fluorouridine-3'-phosphate
  modified_base 10: mod_base = OTHER; note = 2'-deoxy-2'-fluoroguanosine-3'-phosphate
  modified_base 11: mod_base = OTHER; note = 2'-deoxy-2'-fluorocytidine-3'-phosphate
  modified_base 12: mod_base = OTHER; note = 2'-O-methyladenosine-3'-phosphate
  modified_base 13: mod_base = OTHER; note = 2'-O-methyladenosine-3'-phosphate
  modified_base 14: mod_base = OTHER; note = 2'-O-methylcytidine-3'-phosphate
  modified_base 15: mod_base = OTHER; note = 2'-O-methylcytidine-3'-phosphate
  modified_base 16: mod_base = OTHER; note = 2'-O-methyluridine-3'-phosphate
  modified_base 17: mod_base = OTHER; note = 2'-O-methylguanosine-3'-phosphate
  modified_base 18: mod_base = OTHER; note = 2'-O-methyladenosine-3'-phosphate
  modified_base 19: mod_base = OTHER; note = 2'-O-methyladenosine-3'-phosphate
  modified_base 20: mod_base = OTHER; note = 2'-O-methyladenosine-3'-phosphate
  modified_base 21: mod_base = OTHER; note = 2'-O-methyladenosine
gggagtactgcaacctgaaaa

SEQ ID NO: 3880 - RNA, 21 nt, synthetic construct
  source 1..21: mol_type = other RNA
  modified_base 1: mod_base = OTHER; note = 2'-O-methylguanosine-3'-phosphate
  modified_base 2: mod_base = OTHER; note = 2'-O-methylguanosine-3'-phosphate
  modified_base 3: mod_base = OTHER; note = 2'-O-methyladenosine-3'-phosphate
  modified_base 4: mod_base = OTHER; note = 2'-O-methylguanosine-3'-phosphate
  modified_base 5: mod_base = OTHER; note = 2'-O-methyluridine-3'-phosphate
  modified_base 6: mod_base = OTHER; note = 2'-O-methyladenosine-3'-phosphate
  modified_base 7: mod_base = OTHER; note = 2'-deoxy-2'-fluorocytidine-3'-phosphate
  modified_base 8: mod_base = OTHER; note = 2'-O-methyluridine-3'-phosphate
  modified_base 9: mod_base = OTHER; note = 2'-deoxy-2'-fluoroguanosine-3'-phosphate
  modified_base 10: mod_base = OTHER; note = 2'-deoxy-2'-fluorocytidine-3'-phosphate
  modified_base 11: mod_base = OTHER; note = 2'-deoxy-2'-fluoroadenosine-3'-phosphate
  modified_base 12: mod_base = OTHER; note = 2'-O-methyladenosine-3'-phosphate
  modified_base 13: mod_base = OTHER; note = 2'-O-methylcytidine-3'-phosphate
  modified_base 14: mod_base = OTHER; note = 2'-O-methylcytidine-3'-phosphate
  modified_base 15: mod_base = OTHER; note = 2'-O-methyluridine-3'-phosphate
  modified_base 16: mod_base = OTHER; note = 2'-O-methylguanosine-3'-phosphate
  modified_base 17: mod_base = OTHER; note = 2'-O-methyladenosine-3'-phosphate
  modified_base 18: mod_base = OTHER; note = 2'-O-methyladenosine-3'-phosphate
  modified_base 19: mod_base = OTHER; note = 2'-O-methyladenosine-3'-phosphate
  modified_base 20: mod_base = OTHER; note = 2'-O-methyladenosine-3'-phosphate
  modified_base 21: mod_base = OTHER; note = 2'-O-methyladenosine
ggagtactgcaacctgaaaaa

SEQ ID NO: 3881 - RNA, 21 nt, synthetic construct
  source 1..21: mol_type = other RNA
  modified_base 1: mod_base = OTHER; note = 2'-O-methylguanosine-3'-phosphate
  modified_base 2: mod_base = OTHER; note = 2'-O-methyladenosine-3'-phosphate
  modified_base 3: mod_base = OTHER; note = 2'-O-methylguanosine-3'-phosphate
  modified_base 4: mod_base = OTHER; note = 2'-O-methyluridine-3'-phosphate
  modified_base 5: mod_base = OTHER; note = 2'-O-methyladenosine-3'-phosphate
  modified_base 6: mod_base = OTHER; note = 2'-O-methylcytidine-3'-phosphate
  modified_base 7: mod_base = OTHER; note = 2'-deoxy-2'-fluorouridine-3'-phosphate
  modified_base 8: mod_base = OTHER; note = 2'-O-methylguanosine-3'-phosphate
  modified_base 9: mod_base = OTHER; note = 2'-deoxy-2'-fluorocytidine-3'-phosphate
  modified_base 10: mod_base = OTHER; note = 2'-deoxy-2'-fluoroadenosine-3'-phosphate
  modified_base 11: mod_base = OTHER; note = 2'-deoxy-2'-fluoroadenosine-3'-phosphate
  modified_base 12: mod_base = OTHER; note = 2'-O-methylcytidine-3'-phosphate
  modified_base 13: mod_base = OTHER; note = 2'-O-methylcytidine-3'-phosphate
  modified_base 14: mod_base = OTHER; note = 2'-O-methyluridine-3'-phosphate
  modified_base 15: mod_base = OTHER; note = 2'-O-methylguanosine-3'-phosphate
  modified_base 16: mod_base = OTHER; note = 2'-O-methyladenosine-3'-phosphate
  modified_base 17: mod_base = OTHER; note = 2'-O-methyladenosine-3'-phosphate
  modified_base 18: mod_base = OTHER; note = 2'-O-methyladenosine-3'-phosphate
  modified_base 19: mod_base = OTHER; note = 2'-O-methyladenosine-3'-phosphate
  modified_base 20: mod_base = OTHER; note = 2'-O-methyladenosine-3'-phosphate
  modified_base 21: mod_base = OTHER; note = 2'-O-methyladenosine
gagtactgcaacctgaaaaaa

SEQ ID NO: 3882 - RNA, 21 nt, synthetic construct
  source 1..21: mol_type = other RNA
  modified_base 1: mod_base = OTHER; note = 2'-O-methyladenosine-3'-phosphate
  modified_base 2: mod_base = OTHER; note = 2'-O-methylguanosine-3'-phosphate
  modified_base 3: mod_base = OTHER; note = 2'-O-methyluridine-3'-phosphate
  modified_base 4: mod_base = OTHER; note = 2'-O-methyladenosine-3'-phosphate
  modified_base 5: mod_base = OTHER; note = 2'-O-methylcytidine-3'-phosphate
  modified_base 6: mod_base = OTHER; note = 2'-O-methyluridine-3'-phosphate
  modified_base 7: mod_base = OTHER; note = 2'-deoxy-2'-fluoroguanosine-3'-phosphate
  modified_base 8: mod_base = OTHER; note = 2'-O-methylcytidine-3'-phosphate
  modified_base 9: mod_base = OTHER; note = 2'-deoxy-2'-fluoroadenosine-3'-phosphate
  modified_base 10: mod_base = OTHER; note = 2'-deoxy-2'-fluoroadenosine-3'-phosphate
  modified_base 11: mod_base = OTHER; note = 2'-deoxy-2'-fluorocytidine-3'-phosphate
  modified_base 12: mod_base = OTHER; note = 2'-O-methylcytidine-3'-phosphate
  modified_base 13: mod_base = OTHER; note = 2'-O-methyluridine-3'-phosphate
  modified_base 14: mod_base = OTHER; note = 2'-O-methylguanosine-3'-phosphate
  modified_base 15: mod_base = OTHER; note = 2'-O-methyladenosine-3'-phosphate
  modified_base 16: mod_base = OTHER; note = 2'-O-methyladenosine-3'-phosphate
  modified_base 17: mod_base = OTHER; note = 2'-O-methyladenosine-3'-phosphate
  modified_base 18: mod_base = OTHER; note = 2'-O-methyladenosine-3'-phosphate
  modified_base 19: mod_base = OTHER; note = 2'-O-methyladenosine-3'-phosphate
  modified_base 20: mod_base = OTHER; note = 2'-O-methyladenosine-3'-phosphate
  modified_base 21: mod_base = OTHER; note = 2'-O-methyladenosine
agtactgcaacctgaaaaaaa

SEQ ID NO: 3883 - RNA, 21 nt, synthetic construct
  source 1..21: mol_type = other RNA
  modified_base 1: mod_base = OTHER; note = 2'-O-methylguanosine-3'-phosphate
  modified_base 2: mod_base = OTHER; note = 2'-O-methyluridine-3'-phosphate
  modified_base 3: mod_base = OTHER; note = 2'-O-methyladenosine-3'-phosphate
  modified_base 4: mod_base = OTHER; note = 2'-O-methylcytidine-3'-phosphate
  modified_base 5: mod_base = OTHER; note = 2'-O-methyluridine-3'-phosphate
  modified_base 6: mod_base = OTHER; note = 2'-O-methylguanosine-3'-phosphate
  modified_base 7: mod_base = OTHER; note = 2'-deoxy-2'-fluorocytidine-3'-phosphate
  modified_base 8: mod_base = OTHER; note = 2'-O-methyladenosine-3'-phosphate
  modified_base 9: mod_base = OTHER; note = 2'-deoxy-2'-fluoroadenosine-3'-phosphate
  modified_base 10: mod_base = OTHER; note = 2'-deoxy-2'-fluorocytidine-3'-phosphate
  modified_base 11: mod_base = OTHER; note = 2'-deoxy-2'-fluorocytidine-3'-phosphate
  modified_base 12: mod_base = OTHER; note = 2'-O-methyluridine-3'-phosphate
  modified_base 13: mod_base = OTHER; note = 2'-O-methylguanosine-3'-phosphate
  modified_base 14: mod_base = OTHER; note = 2'-O-methyladenosine-3'-phosphate
  modified_base 15: mod_base = OTHER; note = 2'-O-methyladenosine-3'-phosphate
  modified_base 16: mod_base = OTHER; note = 2'-O-methyladenosine-3'-phosphate
  modified_base 17: mod_base = OTHER; note = 2'-O-methyladenosine-3'-phosphate
  modified_base 18: mod_base = OTHER; note = 2'-O-methyladenosine-3'-phosphate
  modified_base 19: mod_base = OTHER; note = 2'-O-methyladenosine-3'-phosphate
  modified_base 20: mod_base = OTHER; note = 2'-O-methyluridine-3'-phosphate
  modified_base 21: mod_base = OTHER; note = 2'-O-methyladenosine
gtactgcaacctgaaaaaata

SEQ ID NO: 3884 - RNA, 21 nt, synthetic construct
  source 1..21: mol_type = other RNA
  modified_base 1: mod_base = OTHER; note = 2'-O-methyluridine-3'-phosphate
  modified_base 2: mod_base = OTHER; note = 2'-O-methyladenosine-3'-phosphate
  modified_base 3: mod_base = OTHER; note = 2'-O-methylcytidine-3'-phosphate
  modified_base 4: mod_base = OTHER; note = 2'-O-methyluridine-3'-phosphate
  modified_base 5: mod_base = OTHER; note = 2'-O-methylguanosine-3'-phosphate
  modified_base 6: mod_base = OTHER; note = 2'-O-methylcytidine-3'-phosphate
  modified_base 7: mod_base = OTHER; note = 2'-deoxy-2'-fluoroadenosine-3'-phosphate
  modified_base 8: mod_base = OTHER; note = 2'-O-methyladenosine-3'-phosphate
  modified_base 9: mod_base = OTHER; note = 2'-deoxy-2'-fluorocytidine-3'-phosphate
  modified_base 10: mod_base = OTHER; note = 2'-deoxy-2'-fluorocytidine-3'-phosphate
  modified_base 11: mod_base = OTHER; note = 2'-deoxy-2'-fluorouridine-3'-phosphate
  modified_base 12: mod_base = OTHER; note = 2'-O-methylguanosine-3'-phosphate
  modified_base 13: mod_base = OTHER; note = 2'-O-methyladenosine-3'-phosphate
  modified_base 14: mod_base = OTHER; note = 2'-O-methyladenosine-3'-phosphate
  modified_base 15: mod_base = OTHER; note = 2'-O-methyladenosine-3'-phosphate
  modified_base 16: mod_base = OTHER; note = 2'-O-methyladenosine-3'-phosphate
  modified_base 17: mod_base = OTHER; note = 2'-O-methyladenosine-3'-phosphate
  modified_base 18: mod_base = OTHER; note = 2'-O-methyladenosine-3'-phosphate
  modified_base 19: mod_base = OTHER; note = 2'-O-methyluridine-3'-phosphate
  modified_base 20: mod_base = OTHER; note = 2'-O-methylguanosine-3'-phosphate
  modified_base 21: mod_base = OTHER; note = 2'-O-methyladenosine
tactgcaacctgaaaaaatga

SEQ ID NO: 3885 - RNA, 21 nt, synthetic construct
  source 1..21: mol_type = other RNA
  modified_base 1: mod_base = OTHER; note = 2'-O-methyladenosine-3'-phosphate
  modified_base 2: mod_base = OTHER; note = 2'-O-methylcytidine-3'-phosphate
  modified_base 3: mod_base = OTHER; note = 2'-O-methyluridine-3'-phosphate
  modified_base 4: mod_base = OTHER; note = 2'-O-methylguanosine-3'-phosphate
  modified_base 5: mod_base = OTHER; note = 2'-O-methylcytidine-3'-phosphate
  modified_base 6: mod_base = OTHER; note = 2'-O-methyladenosine-3'-phosphate
  modified_base 7: mod_base = OTHER; note = 2'-deoxy-2'-fluoroadenosine-3'-phosphate
  modified_base 8: mod_base = OTHER; note = 2'-O-methylcytidine-3'-phosphate
  modified_base 9: mod_base = OTHER; note = 2'-deoxy-2'-fluorocytidine-3'-phosphate
  modified_base 10: mod_base = OTHER; note = 2'-deoxy-2'-fluorouridine-3'-phosphate
  modified_base 11: mod_base = OTHER; note = 2'-deoxy-2'-fluoroguanosine-3'-phosphate
  modified_base 12: mod_base = OTHER; note = 2'-O-methyladenosine-3'-phosphate
  modified_base 13: mod_base = OTHER; note = 2'-O-methyladenosine-3'-phosphate
  modified_base 14: mod_base = OTHER; note = 2'-O-methyladenosine-3'-phosphate
  modified_base 15: mod_base = OTHER; note = 2'-O-methyladenosine-3'-phosphate
  modified_base 16: mod_base = OTHER; note = 2'-O-methyladenosine-3'-phosphate
  modified_base 17: mod_base = OTHER; note = 2'-O-methyladenosine-3'-phosphate
  modified_base 18: mod_base = OTHER; note = 2'-O-methyluridine-3'-phosphate
  modified_base 19: mod_base = OTHER; note = 2'-O-methylguanosine-3'-phosphate
  modified_base 20: mod_base = OTHER; note = 2'-O-methylcytidine-3'-phosphate
  modified_base 21: mod_base = OTHER; note = 2'-O-methyladenosine
actgcaacctgaaaaaatgca

SEQ ID NO: 3886 - RNA, 21 nt, synthetic construct
  source 1..21: mol_type = other RNA
  modified_base 1: mod_base = OTHER; note = 2'-O-methylcytidine-3'-phosphate
  modified_base 2: mod_base = OTHER; note = 2'-O-methyluridine-3'-phosphate
  modified_base 3: mod_base = OTHER; note = 2'-O-methylguanosine-3'-phosphate
  modified_base 4: mod_base = OTHER; note = 2'-O-methylcytidine-3'-phosphate
  modified_base 5: mod_base = OTHER; note = 2'-O-methyladenosine-3'-phosphate
  modified_base 6: mod_base = OTHER; note = 2'-O-methyladenosine-3'-phosphate
  modified_base 7: mod_base = OTHER; note = 2'-deoxy-2'-fluorocytidine-3'-phosphate
  modified_base 8: mod_base = OTHER; note = 2'-O-methylcytidine-3'-phosphate
  modified_base 9: mod_base = OTHER; note = 2'-deoxy-2'-fluorouridine-3'-phosphate
  modified_base 10: mod_base = OTHER; note = 2'-deoxy-2'-fluoroguanosine-3'-phosphate
  modified_base 11: mod_base = OTHER; note = 2'-deoxy-2'-fluoroadenosine-3'-phosphate
  modified_base 12: mod_base = OTHER; note = 2'-O-methyladenosine-3'-phosphate
  modified_base 13: mod_base = OTHER; note = 2'-O-methyladenosine-3'-phosphate
  modified_base 14: mod_base = OTHER; note = 2'-O-methyladenosine-3'-phosphate
  modified_base 15: mod_base = OTHER; note = 2'-O-methyladenosine-3'-phosphate
  modified_base 16: mod_base = OTHER; note = 2'-O-methyladenosine-3'-phosphate
  modified_base 17: mod_base = OTHER; note = 2'-O-methyluridine-3'-phosphate
  modified_base 18: mod_base = OTHER; note = 2'-O-methylguanosine-3'-phosphate
  modified_base 19: mod_base = OTHER; note = 2'-O-methylcytidine-3'-phosphate
  modified_base 20: mod_base = OTHER; note = 2'-O-methyluridine-3'-phosphate
  modified_base 21: mod_base = OTHER; note = 2'-O-methyladenosine
ctgcaacctgaaaaaatgcta

SEQ ID NO: 3887 - RNA, 21 nt, synthetic construct
  source 1..21: mol_type = other RNA
  modified_base 1: mod_base = OTHER; note = 2'-O-methyluridine-3'-phosphate
  modified_base 2: mod_base = OTHER; note = 2'-O-methylguanosine-3'-phosphate
  modified_base 3: mod_base = OTHER; note = 2'-O-methylcytidine-3'-phosphate
  modified_base 4: mod_base = OTHER; note = 2'-O-methyladenosine-3'-phosphate
  modified_base 5: mod_base = OTHER; note = 2'-O-methyladenosine-3'-phosphate
  modified_base 6: mod_base = OTHER; note = 2'-O-methylcytidine-3'-phosphate
  modified_base 7: mod_base = OTHER; note = 2'-deoxy-2'-fluorocytidine-3'-phosphate
  modified_base 8: mod_base = OTHER; note = 2'-O-methyluridine-3'-phosphate
  modified_base 9: mod_base = OTHER; note = 2'-deoxy-2'-fluoroguanosine-3'-phosphate
  modified_base 10: mod_base = OTHER; note = 2'-deoxy-2'-fluoroadenosine-3'-phosphate
  modified_base 11: mod_base = OTHER; note = 2'-deoxy-2'-fluoroadenosine-3'-phosphate
  modified_base 12: mod_base = OTHER; note = 2'-O-methyladenosine-3'-phosphate
  modified_base 13: mod_base = OTHER; note = 2'-O-methyladenosine-3'-phosphate
  modified_base 14: mod_base = OTHER; note = 2'-O-methyladenosine-3'-phosphate
  modified_base 15: mod_base = OTHER; note = 2'-O-methyladenosine-3'-phosphate
  modified_base 16: mod_base = OTHER; note = 2'-O-methyluridine-3'-phosphate
  modified_base 17: mod_base = OTHER; note = 2'-O-methylguanosine-3'-phosphate
  modified_base 18: mod_base = OTHER; note = 2'-O-methylcytidine-3'-phosphate
  modified_base 19: mod_base = OTHER; note = 2'-O-methyluridine-3'-phosphate
  modified_base 20: mod_base = OTHER; note = 2'-O-methylcytidine-3'-phosphate
  modified_base 21: mod_base = OTHER; note = 2'-O-methyladenosine
tgcaacctgaaaaaatgctca

SEQ ID NO: 3888 - RNA, 21 nt, synthetic construct
  source 1..21: mol_type = other RNA
  modified_base 1: mod_base = OTHER; note = 2'-O-methylguanosine-3'-phosphate
  modified_base 2: mod_base = OTHER; note = 2'-O-methylcytidine-3'-phosphate
  modified_base 3: mod_base = OTHER; note = 2'-O-methyladenosine-3'-phosphate
  modified_base 4: mod_base = OTHER; note = 2'-O-methyladenosine-3'-phosphate
  modified_base 5: mod_base = OTHER; note = 2'-O-methylcytidine-3'-phosphate
  modified_base 6: mod_base = OTHER; note = 2'-O-methylcytidine-3'-phosphate
  modified_base 7: mod_base = OTHER; note = 2'-deoxy-2'-fluorouridine-3'-phosphate
  modified_base 8: mod_base = OTHER; note = 2'-O-methylguanosine-3'-phosphate
  modified_base 9: mod_base = OTHER; note = 2'-deoxy-2'-fluoroadenosine-3'-phosphate
  modified_base 10: mod_base = OTHER; note = 2'-deoxy-2'-fluoroadenosine-3'-phosphate
  modified_base 11: mod_base = OTHER; note = 2'-deoxy-2'-fluoroadenosine-3'-phosphate
  modified_base 12: mod_base = OTHER; note = 2'-O-methyladenosine-3'-phosphate
  modified_base 13: mod_base = OTHER; note = 2'-O-methyladenosine-3'-phosphate
  modified_base 14: mod_base = OTHER; note = 2'-O-methyladenosine-3'-phosphate
  modified_base 15: mod_base = OTHER; note = 2'-O-methyluridine-3'-phosphate
  modified_base 16: mod_base = OTHER; note = 2'-O-methylguanosine-3'-phosphate
  modified_base 17: mod_base = OTHER; note = 2'-O-methylcytidine-3'-phosphate
  modified_base 18: mod_base = OTHER; note = 2'-O-methyluridine-3'-phosphate
  modified_base 19: mod_base = OTHER; note = 2'-O-methylcytidine-3'-phosphate
  modified_base 20: mod_base = OTHER; note = 2'-O-methyladenosine-3'-phosphate
  modified_base 21: mod_base = OTHER; note = 2'-O-methyladenosine
gcaacctgaaaaaatgctcaa

SEQ ID NO: 3889 - RNA, 21 nt, synthetic construct
  source 1..21: mol_type = other RNA
  modified_base 1: mod_base = OTHER; note = 2'-O-methylcytidine-3'-phosphate
  modified_base 2: mod_base = OTHER; note = 2'-O-methyladenosine-3'-phosphate
  modified_base 3: mod_base = OTHER; note = 2'-O-methyladenosine-3'-phosphate
  modified_base 4: mod_base = OTHER; note = 2'-O-methylcytidine-3'-phosphate
  modified_base 5: mod_base = OTHER; note = 2'-O-methylcytidine-3'-phosphate
  modified_base 6: mod_base = OTHER; note = 2'-O-methyluridine-3'-phosphate
  modified_base 7: mod_base = OTHER; note = 2'-deoxy-2'-fluoroguanosine-3'-phosphate
  modified_base 8: mod_base = OTHER; note = 2'-O-methyladenosine-3'-phosphate
  modified_base 9: mod_base = OTHER; note = 2'-deoxy-2'-fluoroadenosine-3'-phosphate
  modified_base 10: mod_base = OTHER; note = 2'-deoxy-2'-fluoroadenosine-3'-phosphate
  modified_base 11: mod_base = OTHER; note = 2'-deoxy-2'-fluoroadenosine-3'-phosphate
  modified_base 12: mod_base = OTHER; note = 2'-O-methyladenosine-3'-phosphate
  modified_base 13: mod_base = OTHER; note = 2'-O-methyladenosine-3'-phosphate
  modified_base 14: mod_base = OTHER; note = 2'-O-methyluridine-3'-phosphate
  modified_base 15: mod_base = OTHER; note = 2'-O-methylguanosine-3'-phosphate
  modified_base 16: mod_base = OTHER; note = 2'-O-methylcytidine-3'-phosphate
  modified_base 17: mod_base = OTHER; note = 2'-O-methyluridine-3'-phosphate
  modified_base 18: mod_base = OTHER; note = 2'-O-methylcytidine-3'-phosphate
  modified_base 19: mod_base = OTHER; note = 2'-O-methyladenosine-3'-phosphate
  modified_base 20: mod_base = OTHER; note = 2'-O-methylguanosine-3'-phosphate
  modified_base 21: mod_base = OTHER; note = 2'-O-methyladenosine
caacctgaaaaaatgctcaga

SEQ ID NO: 3890 - RNA, 21 nt, synthetic construct
  source 1..21: mol_type = other RNA
  modified_base 1: mod_base = OTHER; note = 2'-O-methyladenosine-3'-phosphate
  modified_base 2: mod_base = OTHER; note = 2'-O-methyladenosine-3'-phosphate
  modified_base 3: mod_base = OTHER; note = 2'-O-methylcytidine-3'-phosphate
  modified_base 4: mod_base = OTHER; note = 2'-O-methylcytidine-3'-phosphate
  modified_base 5: mod_base = OTHER; note = 2'-O-methyluridine-3'-phosphate
  modified_base 6: mod_base = OTHER; note = 2'-O-methylguanosine-3'-phosphate
  modified_base 7: mod_base = OTHER; note = 2'-deoxy-2'-fluoroadenosine-3'-phosphate
  modified_base 8: mod_base = OTHER; note = 2'-O-methyladenosine-3'-phosphate
  modified_base 9: mod_base = OTHER; note = 2'-deoxy-2'-fluoroadenosine-3'-phosphate
  modified_base 10: mod_base = OTHER; note = 2'-deoxy-2'-fluoroadenosine-3'-phosphate
  modified_base 11: mod_base = OTHER; note = 2'-deoxy-2'-fluoroadenosine-3'-phosphate
  modified_base 12: mod_base = OTHER; note = 2'-O-methyladenosine-3'-phosphate
  modified_base 13: mod_base = OTHER; note = 2'-O-methyluridine-3'-phosphate
  modified_base 14: mod_base = OTHER; note = 2'-O-methylguanosine-3'-phosphate
  modified_base 15: mod_base = OTHER; note = 2'-O-methylcytidine-3'-phosphate
  modified_base 16: mod_base = OTHER; note = 2'-O-methyluridine-3'-phosphate
  modified_base 17: mod_base = OTHER; note = 2'-O-methylcytidine-3'-phosphate
  modified_base 18: mod_base = OTHER; note = 2'-O-methyladenosine-3'-phosphate
  modified_base 19: mod_base = OTHER; note = 2'-O-methylguanosine-3'-phosphate
  modified_base 20: mod_base = OTHER; note = 2'-O-methylguanosine-3'-phosphate
  modified_base 21: mod_base = OTHER; note = 2'-O-methyladenosine
aacctgaaaaaatgctcagga

SEQ ID NO: 3891 - RNA, 21 nt, synthetic construct
  source 1..21: mol_type = other RNA
  modified_base 1: mod_base = OTHER; note = 2'-O-methyladenosine-3'-phosphate
  modified_base 2: mod_base = OTHER; note = 2'-O-methylcytidine-3'-phosphate
  modified_base 3: mod_base = OTHER; note = 2'-O-methylcytidine-3'-phosphate
  modified_base 4: mod_base = OTHER; note = 2'-O-methyluridine-3'-phosphate
  modified_base 5: mod_base = OTHER; note = 2'-O-methylguanosine-3'-phosphate
  modified_base 6: mod_base = OTHER; note = 2'-O-methyladenosine-3'-phosphate
  modified_base 7: mod_base = OTHER; note = 2'-deoxy-2'-fluoroadenosine-3'-phosphate
  modified_base 8: mod_base = OTHER; note = 2'-O-methyladenosine-3'-phosphate
  modified_base 9: mod_base = OTHER; note = 2'-deoxy-2'-fluoroadenosine-3'-phosphate
  modified_base 10: mod_base = OTHER; note = 2'-deoxy-2'-fluoroadenosine-3'-phosphate
  modified_base 11: mod_base = OTHER; note = 2'-deoxy-2'-fluoroadenosine-3'-phosphate
  modified_base 12: mod_base = OTHER; note = 2'-O-methyluridine-3'-phosphate
  modified_base 13: mod_base = OTHER; note = 2'-O-methylguanosine-3'-phosphate
  modified_base 14: mod_base = OTHER; note = 2'-O-methylcytidine-3'-phosphate
  modified_base 15: mod_base = OTHER; note = 2'-O-methyluridine-3'-phosphate
  modified_base 16: mod_base = OTHER; note = 2'-O-methylcytidine-3'-phosphate
  modified_base 17: mod_base = OTHER; note = 2'-O-methyladenosine-3'-phosphate
  modified_base 18: mod_base = OTHER; note = 2'-O-methylguanosine-3'-phosphate
  modified_base 19: mod_base = OTHER; note = 2'-O-methylguanosine-3'-phosphate
  modified_base 20: mod_base = OTHER; note = 2'-O-methyladenosine-3'-phosphate
  modified_base 21: mod_base = OTHER; note = 2'-O-methyladenosine
acctgaaaaaatgctcaggaa

SEQ ID NO: 3892 - RNA, 21 nt, synthetic construct
  source 1..21: mol_type = other RNA
  modified_base 1: mod_base = OTHER; note = 2'-O-methylcytidine-3'-phosphate
  modified_base 2: mod_base = OTHER; note = 2'-O-methylcytidine-3'-phosphate
  modified_base 3: mod_base = OTHER; note = 2'-O-methyluridine-3'-phosphate
  modified_base 4: mod_base = OTHER; note = 2'-O-methylguanosine-3'-phosphate
  modified_base 5: mod_base = OTHER; note = 2'-O-methyladenosine-3'-phosphate
  modified_base 6: mod_base = OTHER; note = 2'-O-methyladenosine-3'-phosphate
  modified_base 7: mod_base = OTHER; note = 2'-deoxy-2'-fluoroadenosine-3'-phosphate
  modified_base 8: mod_base = OTHER; note = 2'-O-methyladenosine-3'-phosphate
  modified_base 9: mod_base = OTHER; note = 2'-deoxy-2'-fluoroadenosine-3'-phosphate
  modified_base 10: mod_base = OTHER; note = 2'-deoxy-2'-fluoroadenosine-3'-phosphate
  modified_base 11: mod_base = OTHER; note = 2'-deoxy-2'-fluorouridine-3'-phosphate
  modified_base 12: mod_base = OTHER; note = 2'-O-methylguanosine-3'-phosphate
  modified_base 13: mod_base = OTHER; note = 2'-O-methylcytidine-3'-phosphate
  modified_base 14: mod_base = OTHER; note = 2'-O-methyluridine-3'-phosphate
  modified_base 15: mod_base = OTHER; note = 2'-O-methylcytidine-3'-phosphate
  modified_base 16: mod_base = OTHER; note = 2'-O-methyladenosine-3'-phosphate
  modified_base 17: mod_base = OTHER; note = 2'-O-methylguanosine-3'-phosphate
  modified_base 18: mod_base = OTHER; note = 2'-O-methylguanosine-3'-phosphate
  modified_base 19: mod_base = OTHER; note = 2'-O-methyladenosine-3'-phosphate
  modified_base 20: mod_base = OTHER; note = 2'-O-methyladenosine-3'-phosphate
  modified_base 21: mod_base = OTHER; note = 2'-O-methyladenosine
cctgaaaaaatgctcaggaaa

SEQ ID NO: 3893 - RNA, 21 nt, synthetic construct
  source 1..21: mol_type = other RNA
  modified_base 1: mod_base = OTHER; note = 2'-O-methylcytidine-3'-phosphate
  modified_base 2: mod_base = OTHER; note = 2'-O-methyluridine-3'-phosphate
  modified_base 3: mod_base = OTHER; note = 2'-O-methylguanosine-3'-phosphate
  modified_base 4: mod_base = OTHER; note = 2'-O-methyladenosine-3'-phosphate
  modified_base 5: mod_base = OTHER; note = 2'-O-methyladenosine-3'-phosphate
  modified_base 6: mod_base = OTHER; note = 2'-O-methyladenosine-3'-phosphate
  modified_base 7: mod_base = OTHER; note = 2'-deoxy-2'-fluoroadenosine-3'-phosphate
  modified_base 8: mod_base = OTHER; note = 2'-O-methyladenosine-3'-phosphate
  modified_base 9: mod_base = OTHER; note = 2'-deoxy-2'-fluoroadenosine-3'-phosphate
  modified_base 10: mod_base = OTHER; note = 2'-deoxy-2'-fluorouridine-3'-phosphate
  modified_base 11: mod_base = OTHER; note = 2'-deoxy-2'-fluoroguanosine-3'-phosphate
  modified_base 12: mod_base = OTHER; note = 2'-O-methylcytidine-3'-phosphate
  modified_base 13: mod_base = OTHER; note = 2'-O-methyluridine-3'-phosphate
  modified_base 14: mod_base = OTHER; note = 2'-O-methylcytidine-3'-phosphate
  modified_base 15: mod_base = OTHER; note = 2'-O-methyladenosine-3'-phosphate
  modified_base 16: mod_base = OTHER; note = 2'-O-methylguanosine-3'-phosphate
  modified_base 17: mod_base = OTHER; note = 2'-O-methylguanosine-3'-phosphate
  modified_base 18: mod_base = OTHER; note = 2'-O-methyladenosine-3'-phosphate
  modified_base 19: mod_base = OTHER; note = 2'-O-methyladenosine-3'-phosphate
  modified_base 20: mod_base = OTHER; note = 2'-O-methylcytidine-3'-phosphate
  modified_base 21: mod_base = OTHER; note = 2'-O-methyladenosine
ctgaaaaaatgctcaggaaca

SEQ ID NO: 3894 - RNA, 21 nt, synthetic construct
  source 1..21: mol_type = other RNA
  modified_base 1: mod_base = OTHER; note = 2'-O-methyluridine-3'-phosphate
  modified_base 2: mod_base = OTHER; note = 2'-O-methylguanosine-3'-phosphate
  modified_base 3: mod_base = OTHER; note = 2'-O-methyladenosine-3'-phosphate
  modified_base 4: mod_base = OTHER; note = 2'-O-methyladenosine-3'-phosphate
  modified_base 5: mod_base = OTHER; note = 2'-O-methyladenosine-3'-phosphate
  modified_base 6: mod_base = OTHER; note = 2'-O-methyladenosine-3'-phosphate
  modified_base 7: mod_base = OTHER; note = 2'-deoxy-2'-fluoroadenosine-3'-phosphate
  modified_base 8: mod_base = OTHER; note = 2'-O-methyladenosine-3'-phosphate
  modified_base 9: mod_base = OTHER; note = 2'-deoxy-2'-fluorouridine-3'-phosphate
  modified_base 10: mod_base = OTHER; note = 2'-deoxy-2'-fluoroguanosine-3'-phosphate
  modified_base 11: mod_base = OTHER; note = 2'-deoxy-2'-fluorocytidine-3'-phosphate
  modified_base 12: mod_base = OTHER; note = 2'-O-methyluridine-3'-phosphate
  modified_base 13: mod_base = OTHER; note = 2'-O-methylcytidine-3'-phosphate
  modified_base 14: mod_base = OTHER; note = 2'-O-methyladenosine-3'-phosphate
  modified_base 15: mod_base = OTHER; note = 2'-O-methylguanosine-3'-phosphate
  modified_base 16: mod_base = OTHER; note = 2'-O-methylguanosine-3'-phosphate
  modified_base 17: mod_base = OTHER; note = 2'-O-methyladenosine-3'-phosphate
  modified_base 18: mod_base = OTHER; note = 2'-O-methyladenosine-3'-phosphate
  modified_base 19: mod_base = OTHER; note = 2'-O-methylcytidine-3'-phosphate
  modified_base 20: mod_base = OTHER; note = 2'-O-methyladenosine-3'-phosphate
  modified_base 21: mod_base = OTHER; note = 2'-O-methyladenosine
tgaaaaaatgctcaggaacaa

SEQ ID NO: 3895 - RNA, 21 nt, synthetic construct
  source 1..21: mol_type = other RNA
  modified_base 1: mod_base = OTHER; note = 2'-O-methylguanosine-3'-phosphate
  modified_base 2: mod_base = OTHER; note = 2'-O-methyladenosine-3'-phosphate
  modified_base 3: mod_base = OTHER; note = 2'-O-methyladenosine-3'-phosphate
  modified_base 4: mod_base = OTHER; note = 2'-O-methyladenosine-3'-phosphate
  modified_base 5: mod_base = OTHER; note = 2'-O-methyladenosine-3'-phosphate
  modified_base 6: mod_base = OTHER; note = 2'-O-methyladenosine-3'-phosphate
  modified_base 7: mod_base = OTHER; note = 2'-deoxy-2'-fluoroadenosine-3'-phosphate
  modified_base 8: mod_base = OTHER; note = 2'-O-methyluridine-3'-phosphate
  modified_base 9: mod_base = OTHER; note = 2'-deoxy-2'-fluoroguanosine-3'-phosphate
  modified_base 10: mod_base = OTHER; note = 2'-deoxy-2'-fluorocytidine-3'-phosphate
  modified_base 11: mod_base = OTHER; note = 2'-deoxy-2'-fluorouridine-3'-phosphate
  modified_base 12: mod_base = OTHER; note = 2'-O-methylcytidine-3'-phosphate
  modified_base 13: mod_base = OTHER; note = 2'-O-methyladenosine-3'-phosphate
  modified_base 14: mod_base = OTHER; note = 2'-O-methylguanosine-3'-phosphate
  modified_base 15: mod_base = OTHER; note = 2'-O-methylguanosine-3'-phosphate
  modified_base 16: mod_base = OTHER; note = 2'-O-methyladenosine-3'-phosphate
  modified_base 17: mod_base = OTHER; note = 2'-O-methyladenosine-3'-phosphate
  modified_base 18: mod_base = OTHER; note = 2'-O-methylcytidine-3'-phosphate
  modified_base 19: mod_base = OTHER; note = 2'-O-methyladenosine-3'-phosphate
  modified_base 20: mod_base = OTHER; note = 2'-O-methylguanosine-3'-phosphate
  modified_base 21: mod_base = OTHER; note = 2'-O-methyladenosine
gaaaaaatgctcaggaacaga

SEQ ID NO: 3896 - RNA, 21 nt, synthetic construct
  source 1..21: mol_type = other RNA
  modified_base 1: mod_base = OTHER; note = 2'-O-methyladenosine-3'-phosphate
  modified_base 2: mod_base = OTHER; note = 2'-O-methyladenosine-3'-phosphate
  modified_base 3: mod_base = OTHER; note = 2'-O-methyladenosine-3'-phosphate
  modified_base 4: mod_base = OTHER; note = 2'-O-methyladenosine-3'-phosphate
  modified_base 5: mod_base = OTHER; note = 2'-O-methyladenosine-3'-phosphate
  modified_base 6: mod_base = OTHER; note = 2'-O-methyladenosine-3'-phosphate
  modified_base 7: mod_base = OTHER; note = 2'-deoxy-2'-fluorouridine-3'-phosphate
  modified_base 8: mod_base = OTHER; note = 2'-O-methylguanosine-3'-phosphate
  modified_base 9: mod_base = OTHER; note = 2'-deoxy-2'-fluorocytidine-3'-phosphate
  modified_base 10: mod_base = OTHER; note = 2'-deoxy-2'-fluorouridine-3'-phosphate
  modified_base 11: mod_base = OTHER; note = 2'-deoxy-2'-fluorocytidine-3'-phosphate
  modified_base 12: mod_base = OTHER; note = 2'-O-methyladenosine-3'-phosphate
  modified_base 13: mod_base = OTHER; note = 2'-O-methylguanosine-3'-phosphate
  modified_base 14: mod_base = OTHER; note = 2'-O-methylguanosine-3'-phosphate
  modified_base 15: mod_base = OTHER; note = 2'-O-methyladenosine-3'-phosphate
  modified_base 16: mod_base = OTHER; note = 2'-O-methyladenosine-3'-phosphate
  modified_base 17: mod_base = OTHER; note = 2'-O-methylcytidine-3'-phosphate
  modified_base 18: mod_base = OTHER; note = 2'-O-methyladenosine-3'-phosphate
  modified_base 19: mod_base = OTHER; note = 2'-O-methylguanosine-3'-phosphate
  modified_base 20: mod_base = OTHER; note = 2'-O-methyladenosine-3'-phosphate
  modified_base 21: mod_base = OTHER; note = 2'-O-methyladenosine
aaaaaatgctcaggaacagaa

SEQ ID NO: 3897 - RNA, 21 nt, synthetic construct
  source 1..21: mol_type = other RNA
  modified_base 1: mod_base = OTHER; note = 2'-O-methyladenosine-3'-phosphate
  modified_base 2: mod_base = OTHER; note = 2'-O-methyladenosine-3'-phosphate
  modified_base 3: mod_base = OTHER; note = 2'-O-methyladenosine-3'-phosphate
  modified_base 4: mod_base = OTHER; note = 2'-O-methyladenosine-3'-phosphate
  modified_base 5: mod_base = OTHER; note = 2'-O-methyladenosine-3'-phosphate
  modified_base 6: mod_base = OTHER; note = 2'-O-methyluridine-3'-phosphate
  modified_base 7: mod_base = OTHER; note = 2'-deoxy-2'-fluoroguanosine-3'-phosphate
  modified_base 8: mod_base = OTHER; note = 2'-O-methylcytidine-3'-phosphate
  modified_base 9: mod_base = OTHER; note = 2'-deoxy-2'-fluorouridine-3'-phosphate
  modified_base 10: mod_base = OTHER; note = 2'-deoxy-2'-fluorocytidine-3'-phosphate
  modified_base 11: mod_base = OTHER; note = 2'-deoxy-2'-fluoroadenosine-3'-phosphate
  modified_base 12: mod_base = OTHER; note = 2'-O-methylguanosine-3'-phosphate
  modified_base 13: mod_base = OTHER; note = 2'-O-methylguanosine-3'-phosphate
  modified_base 14: mod_base = OTHER; note = 2'-O-methyladenosine-3'-phosphate
  modified_base 15: mod_base = OTHER; note = 2'-O-methyladenosine-3'-phosphate
  modified_base 16: mod_base = OTHER; note = 2'-O-methylcytidine-3'-phosphate
  modified_base 17: mod_base = OTHER; note = 2'-O-methyladenosine-3'-phosphate
  modified_base 18: mod_base = OTHER; note = 2'-O-methylguanosine-3'-phosphate
  modified_base 19: mod_base = OTHER; note = 2'-O-methyladenosine-3'-phosphate
  modified_base 20: mod_base = OTHER; note = 2'-O-methyladenosine-3'-phosphate
  modified_base 21: mod_base = OTHER; note = 2'-O-methyladenosine
aaaaatgctcaggaacagaaa

SEQ ID NO: 3898 - RNA, 21 nt, synthetic construct
  source 1..21: mol_type = other RNA
  modified_base 1: mod_base = OTHER; note = 2'-O-methyladenosine-3'-phosphate
  modified_base 2: mod_base = OTHER; note = 2'-O-methyladenosine-3'-phosphate
  modified_base 3: mod_base = OTHER; note = 2'-O-methyladenosine-3'-phosphate
  modified_base 4: mod_base = OTHER; note = 2'-O-methyladenosine-3'-phosphate
  modified_base 5: mod_base = OTHER; note = 2'-O-methyluridine-3'-phosphate
  modified_base 6: mod_base = OTHER; note = 2'-O-methylguanosine-3'-phosphate
  modified_base 7: mod_base = OTHER; note = 2'-deoxy-2'-fluorocytidine-3'-phosphate
  modified_base 8: mod_base = OTHER; note = 2'-O-methyluridine-3'-phosphate
  modified_base 9: mod_base = OTHER; note = 2'-deoxy-2'-fluorocytidine-3'-phosphate
  modified_base 10: mod_base = OTHER; note = 2'-deoxy-2'-fluoroadenosine-3'-phosphate
  modified_base 11: mod_base = OTHER; note = 2'-deoxy-2'-fluoroguanosine-3'-phosphate
  modified_base 12: mod_base = OTHER; note = 2'-O-methylguanosine-3'-phosphate
  modified_base 13: mod_base = OTHER; note = 2'-O-methyladenosine-3'-phosphate
  modified_base 14: mod_base = OTHER; note = 2'-O-methyladenosine-3'-phosphate
  modified_base 15: mod_base = OTHER; note = 2'-O-methylcytidine-3'-phosphate
  modified_base 16: mod_base = OTHER; note = 2'-O-methyladenosine-3'-phosphate
  modified_base 17: mod_base = OTHER; note = 2'-O-methylguanosine-3'-phosphate
  modified_base 18: mod_base = OTHER; note = 2'-O-methyladenosine-3'-phosphate
  modified_base 19: mod_base = OTHER; note = 2'-O-methyladenosine-3'-phosphate
  modified_base 20: mod_base = OTHER; note = 2'-O-methylguanosine-3'-phosphate
  modified_base 21: mod_base = OTHER; note = 2'-O-methyladenosine
aaaatgctcaggaacagaaga

SEQ ID NO: 3899 - RNA, 21 nt, synthetic construct
  source 1..21: mol_type = other RNA
  modified_base 1: mod_base = OTHER; note = 2'-O-methyladenosine-3'-phosphate
  modified_base 2: mod_base = OTHER; note = 2'-O-methyladenosine-3'-phosphate
  modified_base 3: mod_base = OTHER; note = 2'-O-methyladenosine-3'-phosphate
  modified_base 4: mod_base = OTHER; note = 2'-O-methyluridine-3'-phosphate
  modified_base 5: mod_base = OTHER; note = 2'-O-methylguanosine-3'-phosphate
  modified_base 6: mod_base = OTHER; note = 2'-O-methylcytidine-3'-phosphate
  modified_base 7: mod_base = OTHER; note = 2'-deoxy-2'-fluorouridine-3'-phosphate
  modified_base 8: mod_base = OTHER; note = 2'-O-methylcytidine-3'-phosphate
  modified_base 9: mod_base = OTHER; note = 2'-deoxy-2'-fluoroadenosine-3'-phosphate
  modified_base 10: mod_base = OTHER; note = 2'-deoxy-2'-fluoroguanosine-3'-phosphate
  modified_base 11: mod_base = OTHER; note = 2'-deoxy-2'-fluoroguanosine-3'-phosphate
  modified_base 12: mod_base = OTHER; note = 2'-O-methyladenosine-3'-phosphate
  modified_base 13: mod_base = OTHER; note = 2'-O-methyladenosine-3'-phosphate
  modified_base 14: mod_base = OTHER; note = 2'-O-methylcytidine-3'-phosphate
  modified_base 15: mod_base = OTHER; note = 2'-O-methyladenosine-3'-phosphate
  modified_base 16: mod_base = OTHER; note = 2'-O-methylguanosine-3'-phosphate
  modified_base 17: mod_base = OTHER; note = 2'-O-methyladenosine-3'-phosphate
  modified_base 18: mod_base = OTHER; note = 2'-O-methyladenosine-3'-phosphate
  modified_base 19: mod_base = OTHER; note = 2'-O-methylguanosine-3'-phosphate
  modified_base 20: mod_base = OTHER; note = 2'-O-methylcytidine-3'-phosphate
  modified_base 21: mod_base = OTHER; note = 2'-O-methyladenosine
aaatgctcaggaacagaagca

SEQ ID NO: 3900 - RNA, 21 nt, synthetic construct
  source 1..21: mol_type = other RNA
  modified_base 1: mod_base = OTHER; note = 2'-O-methylguanosine-3'-phosphate
  modified_base 2: mod_base = OTHER; note = 2'-O-methylcytidine-3'-phosphate
  modified_base 3: mod_base = OTHER; note = 2'-O-methyladenosine-3'-phosphate
  modified_base 4: mod_base = OTHER; note = 2'-O-methylcytidine-3'-phosphate
  modified_base 5: mod_base = OTHER; note = 2'-O-methylcytidine-3'-phosphate
  modified_base 6: mod_base = OTHER; note = 2'-O-methyluridine-3'-phosphate
  modified_base 7: mod_base = OTHER; note = 2'-deoxy-2'-fluorocytidine-3'-phosphate
  modified_base 8: mod_base = OTHER; note = 2'-O-methylcytidine-3'-phosphate
  modified_base 9: mod_base = OTHER; note = 2'-deoxy-2'-fluoroguanosine-3'-phosphate
  modified_base 10: mod_base = OTHER; note = 2'-deoxy-2'-fluorocytidine-3'-phosphate
  modified_base 11: mod_base = OTHER; note = 2'-deoxy-2'-fluorocytidine-3'-phosphate
  modified_base 12: mod_base = OTHER; note = 2'-O-methyluridine-3'-phosphate
  modified_base 13: mod_base = OTHER; note = 2'-O-methylguanosine-3'-phosphate
  modified_base 14: mod_base = OTHER; note = 2'-O-methyluridine-3'-phosphate
  modified_base 15: mod_base = OTHER; note = 2'-O-methyluridine-3'-phosphate
  modified_base 16: mod_base = OTHER; note = 2'-O-methylguanosine-3'-phosphate
  modified_base 17: mod_base = OTHER; note = 2'-O-methyluridine-3'-phosphate
  modified_base 18: mod_base = OTHER; note = 2'-O-methylcytidine-3'-phosphate
  modified_base 19: mod_base = OTHER; note = 2'-O-methylcytidine-3'-phosphate
  modified_base 20: mod_base = OTHER; note = 2'-O-methyluridine-3'-phosphate
  modified_base 21: mod_base = OTHER; note = 2'-O-methyladenosine
gcacctccgcctgttgtccta

SEQ ID NO: 3901 - RNA, 21 nt, synthetic construct
  source 1..21: mol_type = other RNA
  modified_base 1: mod_base = OTHER; note = 2'-O-methylcytidine-3'-phosphate
  modified_base 2: mod_base = OTHER; note = 2'-O-methyladenosine-3'-phosphate
  modified_base 3: mod_base = OTHER; note = 2'-O-methylcytidine-3'-phosphate
  modified_base 4: mod_base = OTHER; note = 2'-O-methylcytidine-3'-phosphate
  modified_base 5: mod_base = OTHER; note = 2'-O-methyluridine-3'-phosphate
  modified_base 6: mod_base = OTHER; note = 2'-O-methylcytidine-3'-phosphate
  modified_base 7: mod_base = OTHER; note = 2'-deoxy-2'-fluorocytidine-3'-phosphate
  modified_base 8: mod_base = OTHER; note = 2'-O-methylguanosine-3'-phosphate
  modified_base 9: mod_base = OTHER; note = 2'-deoxy-2'-fluorocytidine-3'-phosphate
  modified_base 10: mod_base = OTHER; note = 2'-deoxy-2'-fluorocytidine-3'-phosphate
  modified_base 11: mod_base = OTHER; note = 2'-deoxy-2'-fluorouridine-3'-phosphate
  modified_base 12: mod_base = OTHER; note = 2'-O-methylguanosine-3'-phosphate
  modified_base 13: mod_base = OTHER; note = 2'-O-methyluridine-3'-phosphate
  modified_base 14: mod_base = OTHER; note = 2'-O-methyluridine-3'-phosphate
  modified_base 15: mod_base = OTHER; note = 2'-O-methylguanosine-3'-phosphate
  modified_base 16: mod_base = OTHER; note = 2'-O-methyluridine-3'-phosphate
  modified_base 17: mod_base = OTHER; note = 2'-O-methylcytidine-3'-phosphate
  modified_base 18: mod_base = OTHER; note = 2'-O-methylcytidine-3'-phosphate
  modified_base 19: mod_base = OTHER; note = 2'-O-methyluridine-3'-phosphate
  modified_base 20: mod_base = OTHER; note = 2'-O-methylguanosine-3'-phosphate
  modified_base 21: mod_base = OTHER; note = 2'-O-methyladenosine
cacctccgcctgttgtcctga

SEQ ID NO: 3902 - RNA, 21 nt, synthetic construct
  source 1..21: mol_type = other RNA
  modified_base 1: mod_base = OTHER; note = 2'-O-methylcytidine-3'-phosphate
  modified_base 2: mod_base = OTHER; note = 2'-O-methylcytidine-3'-phosphate
  modified_base 3: mod_base = OTHER; note = 2'-O-methyluridine-3'-phosphate
  modified_base 4: mod_base = OTHER; note = 2'-O-methylcytidine-3'-phosphate
  modified_base 5: mod_base = OTHER; note = 2'-O-methylcytidine-3'-phosphate
  modified_base 6: mod_base = OTHER; note = 2'-O-methylguanosine-3'-phosphate
  modified_base 7: mod_base = OTHER; note = 2'-deoxy-2'-fluorocytidine-3'-phosphate
  modified_base 8: mod_base = OTHER; note = 2'-O-methylcytidine-3'-phosphate
  modified_base 9: mod_base = OTHER; note = 2'-deoxy-2'-fluorouridine-3'-phosphate
  modified_base 10: mod_base = OTHER; note = 2'-deoxy-2'-fluoroguanosine-3'-phosphate
  modified_base 11: mod_base = OTHER; note = 2'-deoxy-2'-fluorouridine-3'-phosphate
  modified_base 12: mod_base = OTHER; note = 2'-O-methyluridine-3'-phosphate
  modified_base 13: mod_base = OTHER; note = 2'-O-methylguanosine-3'-phosphate
  modified_base 14: mod_base = OTHER; note = 2'-O-methyluridine-3'-phosphate
  modified_base 15: mod_base = OTHER; note = 2'-O-methylcytidine-3'-phosphate
  modified_base 16: mod_base = OTHER; note = 2'-O-methylcytidine-3'-phosphate
  modified_base 17: mod_base = OTHER; note = 2'-O-methyluridine-3'-phosphate
  modified_base 18: mod_base = OTHER; note = 2'-O-methylguanosine-3'-phosphate
  modified_base 19: mod_base = OTHER; note = 2'-O-methylcytidine-3'-phosphate
  modified_base 20: mod_base = OTHER; note = 2'-O-methyluridine-3'-phosphate
  modified_base 21: mod_base = OTHER; note = 2'-O-methyladenosine
cctccgcctgttgtcctgcta

SEQ ID NO: 3903 - RNA, 21 nt, synthetic construct
  source 1..21: mol_type = other RNA
  modified_base 1: mod_base = OTHER; note = 2'-O-methylcytidine-3'-phosphate
  modified_base 2: mod_base = OTHER; note = 2'-O-methyluridine-3'-phosphate
  modified_base 3: mod_base = OTHER; note = 2'-O-methylcytidine-3'-phosphate
  modified_base 4: mod_base = OTHER; note = 2'-O-methylcytidine-3'-phosphate
  modified_base 5: mod_base = OTHER; note = 2'-O-methylguanosine-3'-phosphate
  modified_base 6: mod_base = OTHER; note = 2'-O-methylcytidine-3'-phosphate
  modified_base 7: mod_base = OTHER; note = 2'-deoxy-2'-fluorocytidine-3'-phosphate
  modified_base 8: mod_base = OTHER; note = 2'-O-methyluridine-3'-phosphate
  modified_base 9: mod_base = OTHER; note = 2'-deoxy-2'-fluoroguanosine-3'-phosphate
  modified_base 10: mod_base = OTHER; note = 2'-deoxy-2'-fluorouridine-3'-phosphate
  modified_base 11: mod_base = OTHER; note = 2'-deoxy-2'-fluorouridine-3'-phosphate
  modified_base 12: mod_base = OTHER; note = 2'-O-methylguanosine-3'-phosphate
  modified_base 13: mod_base = OTHER; note = 2'-O-methyluridine-3'-phosphate
  modified_base 14: mod_base = OTHER; note = 2'-O-methylcytidine-3'-phosphate
  modified_base 15: mod_base = OTHER; note = 2'-O-methylcytidine-3'-phosphate
  modified_base 16: mod_base = OTHER; note = 2'-O-methyluridine-3'-phosphate
  modified_base 17: mod_base = OTHER; note = 2'-O-methylguanosine-3'-phosphate
  modified_base 18: mod_base = OTHER; note = 2'-O-methylcytidine-3'-phosphate
  modified_base 19: mod_base = OTHER; note = 2'-O-methyluridine-3'-phosphate
  modified_base 20: mod_base = OTHER; note = 2'-O-methyluridine-3'-phosphate
  modified_base 21: mod_base = OTHER; note = 2'-O-methyladenosine
ctccgcctgttgtcctgctta

SEQ ID NO: 3904 - RNA, 21 nt, synthetic construct
  source 1..21: mol_type = other RNA
  modified_base 1: mod_base = OTHER; note = 2'-O-methyluridine-3'-phosphate
  modified_base 2: mod_base = OTHER; note = 2'-O-methylcytidine-3'-phosphate
  modified_base 3: mod_base = OTHER; note = 2'-O-methylcytidine-3'-phosphate
  modified_base 4: mod_base = OTHER; note = 2'-O-methylguanosine-3'-phosphate
  modified_base 5: mod_base = OTHER; note = 2'-O-methylcytidine-3'-phosphate
  modified_base 6: mod_base = OTHER; note = 2'-O-methylcytidine-3'-phosphate
  modified_base 7: mod_base = OTHER; note = 2'-deoxy-2'-fluorouridine-3'-phosphate
  modified_base 8: mod_base = OTHER; note = 2'-O-methylguanosine-3'-phosphate
  modified_base 9: mod_base = OTHER; note = 2'-deoxy-2'-fluorouridine-3'-phosphate
  modified_base 10: mod_base = OTHER; note = 2'-deoxy-2'-fluorouridine-3'-phosphate
  modified_base 11: mod_base = OTHER; note = 2'-deoxy-2'-fluoroguanosine-3'-phosphate
  modified_base 12: mod_base = OTHER; note = 2'-O-methyluridine-3'-phosphate
  modified_base 13: mod_base = OTHER; note = 2'-O-methylcytidine-3'-phosphate
  modified_base 14: mod_base = OTHER; note = 2'-O-methylcytidine-3'-phosphate
  modified_base 15: mod_base = OTHER; note = 2'-O-methyluridine-3'-phosphate
  modified_base 16: mod_base = OTHER; note = 2'-O-methylguanosine-3'-phosphate
  modified_base 17: mod_base = OTHER; note = 2'-O-methylcytidine-3'-phosphate
  modified_base 18: mod_base = OTHER; note = 2'-O-methyluridine-3'-phosphate
  modified_base 19: mod_base = OTHER; note = 2'-O-methyluridine-3'-phosphate
  modified_base 20: mod_base = OTHER; note = 2'-O-methylcytidine-3'-phosphate
  modified_base 21: mod_base = OTHER; note = 2'-O-methyladenosine
tccgcctgttgtcctgcttca

SEQ ID NO: 3905 - RNA, 21 nt, synthetic construct
  source 1..21: mol_type = other RNA
  modified_base 1: mod_base = OTHER; note = 2'-O-methylcytidine-3'-phosphate
  modified_base 2: mod_base = OTHER; note = 2'-O-methylcytidine-3'-phosphate
  modified_base 3: mod_base = OTHER; note = 2'-O-methylguanosine-3'-phosphate
  modified_base 4: mod_base = OTHER; note = 2'-O-methylcytidine-3'-phosphate
  modified_base 5: mod_base = OTHER; note = 2'-O-methylcytidine-3'-phosphate
  modified_base 6: mod_base = OTHER; note = 2'-O-methyluridine-3'-phosphate
  modified_base 7: mod_base = OTHER; note = 2'-deoxy-2'-fluoroguanosine-3'-phosphate
  modified_base 8: mod_base = OTHER; note = 2'-O-methyluridine-3'-phosphate
  modified_base 9: mod_base = OTHER; note = 2'-deoxy-2'-fluorouridine-3'-phosphate
  modified_base 10: mod_base = OTHER; note = 2'-deoxy-2'-fluoroguanosine-3'-phosphate
  modified_base 11: mod_base = OTHER; note = 2'-deoxy-2'-fluorouridine-3'-phosphate
  modified_base 12: mod_base = OTHER; note = 2'-O-methylcytidine-3'-phosphate
  modified_base 13: mod_base = OTHER; note = 2'-O-methylcytidine-3'-phosphate
  modified_base 14: mod_base = OTHER; note = 2'-O-methyluridine-3'-phosphate
  modified_base 15: mod_base = OTHER; note = 2'-O-methylguanosine-3'-phosphate
  modified_base 16: mod_base = OTHER; note = 2'-O-methylcytidine-3'-phosphate
  modified_base 17: mod_base = OTHER; note = 2'-O-methyluridine-3'-phosphate
  modified_base 18: mod_base = OTHER; note = 2'-O-methyluridine-3'-phosphate
  modified_base 19: mod_base = OTHER; note = 2'-O-methylcytidine-3'-phosphate
  modified_base 20: mod_base = OTHER; note = 2'-O-methylcytidine-3'-phosphate
  modified_base 21: mod_base = OTHER; note = 2'-O-methyladenosine
ccgcctgttgtcctgcttcca

SEQ ID NO: 3906 - RNA, 21 nt, synthetic construct
  source 1..21: mol_type = other RNA
  modified_base 1: mod_base = OTHER; note = 2'-O-methylcytidine-3'-phosphate
  modified_base 2: mod_base = OTHER; note = 2'-O-methylguanosine-3'-phosphate
  modified_base 3: mod_base = OTHER; note = 2'-O-methylcytidine-3'-phosphate
  modified_base 4: mod_base = OTHER; note = 2'-O-methylcytidine-3'-phosphate
  modified_base 5: mod_base = OTHER; note = 2'-O-methyluridine-3'-phosphate
  modified_base 6: mod_base = OTHER; note = 2'-O-methylguanosine-3'-phosphate
  modified_base 7: mod_base = OTHER; note = 2'-deoxy-2'-fluorouridine-3'-phosphate
  modified_base 8: mod_base = OTHER; note = 2'-O-methyluridine-3'-phosphate
  modified_base 9: mod_base = OTHER; note = 2'-deoxy-2'-fluoroguanosine-3'-phosphate
  modified_base 10: mod_base = OTHER; note = 2'-deoxy-2'-fluorouridine-3'-phosphate
  modified_base 11: mod_base = OTHER; note = 2'-deoxy-2'-fluorocytidine-3'-phosphate
  modified_base 12: mod_base = OTHER; note = 2'-O-methylcytidine-3'-phosphate
  modified_base 13: mod_base = OTHER; note = 2'-O-methyluridine-3'-phosphate
  modified_base 14: mod_base = OTHER; note = 2'-O-methylguanosine-3'-phosphate
  modified_base 15: mod_base = OTHER; note = 2'-O-methylcytidine-3'-phosphate
  modified_base 16: mod_base = OTHER; note = 2'-O-methyluridine-3'-phosphate
  modified_base 17: mod_base = OTHER; note = 2'-O-methyluridine-3'-phosphate
  modified_base 18: mod_base = OTHER; note = 2'-O-methylcytidine-3'-phosphate
  modified_base 19: mod_base = OTHER; note = 2'-O-methylcytidine-3'-phosphate
  modified_base 20: mod_base = OTHER; note = 2'-O-methyladenosine-3'-phosphate
  modified_base 21: mod_base = OTHER; note = 2'-O-methyladenosine
cgcctgttgtcctgcttccaa

SEQ ID NO: 3907 - RNA, 21 nt, synthetic construct
  source 1..21: mol_type = other RNA
  modified_base 1: mod_base = OTHER; note = 2'-O-methylcytidine-3'-phosphate
  modified_base 2: mod_base = OTHER; note = 2'-O-methylcytidine-3'-phosphate
  modified_base 3: mod_base = OTHER; note = 2'-O-methylguanosine-3'-phosphate
  modified_base 4: mod_base = OTHER; note = 2'-O-methyladenosine-3'-phosphate
  modified_base 5: mod_base = OTHER; note = 2'-O-methyladenosine-3'-phosphate
  modified_base 6: mod_base = OTHER; note = 2'-O-methylguanosine-3'-phosphate
  modified_base 7: mod_base = OTHER; note = 2'-deoxy-2'-fluoroadenosine-3'-phosphate
  modified_base 8: mod_base = OTHER; note = 2'-O-methyladenosine-3'-phosphate
  modified_base 9: mod_base = OTHER; note = 2'-deoxy-2'-fluoroguanosine-3'-phosphate
  modified_base 10: mod_base = OTHER; note = 2'-deoxy-2'-fluoroadenosine-3'-phosphate
  modified_base 11: mod_base = OTHER; note = 2'-deoxy-2'-fluorocytidine-3'-phosphate
  modified_base 12: mod_base = OTHER; note = 2'-O-methyluridine-3'-phosphate
  modified_base 13: mod_base = OTHER; note = 2'-O-methylguanosine-3'-phosphate
  modified_base 14: mod_base = OTHER; note = 2'-O-methyluridine-3'-phosphate
  modified_base 15: mod_base = OTHER; note = 2'-O-methyladenosine-3'-phosphate
  modified_base 16: mod_base = OTHER; note = 2'-O-methyluridine-3'-phosphate
  modified_base 17: mod_base = OTHER; note = 2'-O-methylguanosine-3'-phosphate
  modified_base 18: mod_base = OTHER; note = 2'-O-methyluridine-3'-phosphate
  modified_base 19: mod_base = OTHER; note = 2'-O-methyluridine-3'-phosphate
  modified_base 20: mod_base = OTHER; note = 2'-O-methyluridine-3'-phosphate
  modified_base 21: mod_base = OTHER; note = 2'-O-methyladenosine
ccgaagaagactgtatgttta

SEQ ID NO: 3908 - RNA, 21 nt, synthetic construct
  source 1..21: mol_type = other RNA
  modified_base 1: mod_base = OTHER; note = 2'-O-methylcytidine-3'-phosphate
  modified_base 2: mod_base = OTHER; note = 2'-O-methylguanosine-3'-phosphate
  modified_base 3: mod_base = OTHER; note = 2'-O-methyladenosine-3'-phosphate
  modified_base 4: mod_base = OTHER; note = 2'-O-methyladenosine-3'-phosphate
  modified_base 5: mod_base = OTHER; note = 2'-O-methylguanosine-3'-phosphate
  modified_base 6: mod_base = OTHER; note = 2'-O-methyladenosine-3'-phosphate
  modified_base 7: mod_base = OTHER; note = 2'-deoxy-2'-fluoroadenosine-3'-phosphate
  modified_base 8: mod_base = OTHER; note = 2'-O-methylguanosine-3'-phosphate
  modified_base 9: mod_base = OTHER; note = 2'-deoxy-2'-fluoroadenosine-3'-phosphate
  modified_base 10: mod_base = OTHER; note = 2'-deoxy-2'-fluorocytidine-3'-phosphate
  modified_base 11: mod_base = OTHER; note = 2'-deoxy-2'-fluorouridine-3'-phosphate
  modified_base 12: mod_base = OTHER; note = 2'-O-methylguanosine-3'-phosphate
  modified_base 13: mod_base = OTHER; note = 2'-O-methyluridine-3'-phosphate
  modified_base 14: mod_base = OTHER; note = 2'-O-methyladenosine-3'-phosphate
  modified_base 15: mod_base = OTHER; note = 2'-O-methyluridine-3'-phosphate
  modified_base 16: mod_base = OTHER; note = 2'-O-methylguanosine-3'-phosphate
  modified_base 17: mod_base = OTHER; note = 2'-O-methyluridine-3'-phosphate
  modified_base 18: mod_base = OTHER; note = 2'-O-methyluridine-3'-phosphate
  modified_base 19: mod_base = OTHER; note = 2'-O-methyluridine-3'-phosphate
  modified_base 20: mod_base = OTHER; note = 2'-O-methylguanosine-3'-phosphate
  modified_base 21: mod_base = OTHER; note = 2'-O-methyladenosine
cgaagaagactgtatgtttga

SEQ ID NO: 3909 - RNA, 21 nt, synthetic construct
  source 1..21: mol_type = other RNA
  modified_base 1: mod_base = OTHER; note = 2'-O-methylguanosine-3'-phosphate
  modified_base 2: mod_base = OTHER; note = 2'-O-methyladenosine-3'-phosphate
  modified_base 3: mod_base = OTHER; note = 2'-O-methyladenosine-3'-phosphate
  modified_base 4: mod_base = OTHER; note = 2'-O-methylguanosine-3'-phosphate
  modified_base 5: mod_base = OTHER; note = 2'-O-methyladenosine-3'-phosphate
  modified_base 6: mod_base = OTHER; note = 2'-O-methyladenosine-3'-phosphate
  modified_base 7: mod_base = OTHER; note = 2'-deoxy-2'-fluoroguanosine-3'-phosphate
  modified_base 8: mod_base = OTHER; note = 2'-O-methyladenosine-3'-phosphate
  modified_base 9: mod_base = OTHER; note = 2'-deoxy-2'-fluorocytidine-3'-phosphate
  modified_base 10: mod_base = OTHER; note = 2'-deoxy-2'-fluorouridine-3'-phosphate
  modified_base 11: mod_base = OTHER; note = 2'-deoxy-2'-fluoroguanosine-3'-phosphate
  modified_base 12: mod_base = OTHER; note = 2'-O-methyluridine-3'-phosphate
  modified_base 13: mod_base = OTHER; note = 2'-O-methyladenosine-3'-phosphate
  modified_base 14: mod_base = OTHER; note = 2'-O-methyluridine-3'-phosphate
  modified_base 15: mod_base = OTHER; note = 2'-O-methylguanosine-3'-phosphate
  modified_base 16: mod_base = OTHER; note = 2'-O-methyluridine-3'-phosphate
  modified_base 17: mod_base = OTHER; note = 2'-O-methyluridine-3'-phosphate
  modified_base 18: mod_base = OTHER; note = 2'-O-methyluridine-3'-phosphate
  modified_base 19: mod_base = OTHER; note = 2'-O-methylguanosine-3'-phosphate
  modified_base 20: mod_base = OTHER; note = 2'-O-methylguanosine-3'-phosphate
  modified_base 21: mod_base = OTHER; note = 2'-O-methyladenosine
gaagaagactgtatgtttgga

SEQ ID NO: 3910 - RNA, 21 nt, synthetic construct
  source 1..21: mol_type = other RNA
  modified_base 1: mod_base = OTHER; note = 2'-O-methyladenosine-3'-phosphate
  modified_base 2: mod_base = OTHER; note = 2'-O-methyladenosine-3'-phosphate
  modified_base 3: mod_base = OTHER; note = 2'-O-methylguanosine-3'-phosphate
  modified_base 4: mod_base = OTHER; note = 2'-O-methyladenosine-3'-phosphate
  modified_base 5: mod_base = OTHER; note = 2'-O-methyladenosine-3'-phosphate
  modified_base 6: mod_base = OTHER; note = 2'-O-methylguanosine-3'-phosphate
  modified_base 7: mod_base = OTHER; note = 2'-deoxy-2'-fluoroadenosine-3'-phosphate
  modified_base 8: mod_base = OTHER; note = 2'-O-methylcytidine-3'-phosphate
  modified_base 9: mod_base = OTHER; note = 2'-deoxy-2'-fluorouridine-3'-phosphate
  modified_base 10: mod_base = OTHER; note = 2'-deoxy-2'-fluoroguanosine-3'-phosphate
  modified_base 11: mod_base = OTHER; note = 2'-deoxy-2'-fluorouridine-3'-phosphate
  modified_base 12: mod_base = OTHER; note = 2'-O-methyladenosine-3'-phosphate
  modified_base 13: mod_base = OTHER; note = 2'-O-methyluridine-3'-phosphate
  modified_base 14: mod_base = OTHER; note = 2'-O-methylguanosine-3'-phosphate
  modified_base 15: mod_base = OTHER; note = 2'-O-methyluridine-3'-phosphate
  modified_base 16: mod_base = OTHER; note = 2'-O-methyluridine-3'-phosphate
  modified_base 17: mod_base = OTHER; note = 2'-O-methyluridine-3'-phosphate
  modified_base 18: mod_base = OTHER; note = 2'-O-methylguanosine-3'-phosphate
  modified_base 19: mod_base = OTHER; note = 2'-O-methylguanosine-3'-phosphate
  modified_base 20: mod_base = OTHER; note = 2'-O-methylguanosine-3'-phosphate
  modified_base 21: mod_base = OTHER; note = 2'-O-methyladenosine
aagaagactgtatgtttggga

SEQ ID NO: 3911 - RNA, 21 nt, synthetic construct
  source 1..21: mol_type = other RNA
  modified_base 1: mod_base = OTHER; note = 2'-O-methylguanosine-3'-phosphate
  modified_base 2: mod_base = OTHER; note = 2'-O-methylcytidine-3'-phosphate
  modified_base 3: mod_base = OTHER; note = 2'-O-methylguanosine-3'-phosphate
  modified_base 4: mod_base = OTHER; note = 2'-O-methyladenosine-3'-phosphate
  modified_base 5: mod_base = OTHER; note = 2'-O-methylcytidine-3'-phosphate
  modified_base 6: mod_base = OTHER; note = 2'-O-methylcytidine-3'-phosphate
  modified_base 7: mod_base = OTHER; note = 2'-deoxy-2'-fluoroadenosine-3'-phosphate
  modified_base 8: mod_base = OTHER; note = 2'-O-methylcytidine-3'-phosphate
  modified_base 9: mod_base = OTHER; note = 2'-deoxy-2'-fluorouridine-3'-phosphate
  modified_base 10: mod_base = OTHER; note = 2'-deoxy-2'-fluoroguanosine-3'-phosphate
  modified_base 11: mod_base = OTHER; note = 2'-deoxy-2'-fluorouridine-3'-phosphate
  modified_base 12: mod_base = OTHER; note = 2'-O-methyluridine-3'-phosphate
  modified_base 13: mod_base = OTHER; note = 2'-O-methyladenosine-3'-phosphate
  modified_base 14: mod_base = OTHER; note = 2'-O-methylcytidine-3'-phosphate
  modified_base 15: mod_base = OTHER; note = 2'-O-methyluridine-3'-phosphate
  modified_base 16: mod_base = OTHER; note = 2'-O-methylguanosine-3'-phosphate
  modified_base 17: mod_base = OTHER; note = 2'-O-methylguanosine-3'-phosphate
  modified_base 18: mod_base = OTHER; note = 2'-O-methylguanosine-3'-phosphate
  modified_base 19: mod_base = OTHER; note = 2'-O-methyladenosine-3'-phosphate
  modified_base 20: mod_base = OTHER; note = 2'-O-methylcytidine-3'-phosphate
  modified_base 21: mod_base = OTHER; note = 2'-O-methyladenosine
gcgaccactgttactgggaca

SEQ ID NO: 3912 - RNA, 21 nt, synthetic construct
  source 1..21: mol_type = other RNA
  modified_base 1: mod_base = OTHER; note = 2'-O-methylcytidine-3'-phosphate
  modified_base 2: mod_base = OTHER; note = 2'-O-methyluridine-3'-phosphate
  modified_base 3: mod_base = OTHER; note = 2'-O-methylguanosine-3'-phosphate
  modified_base 4: mod_base = OTHER; note = 2'-O-methylguanosine-3'-phosphate
  modified_base 5: mod_base = OTHER; note = 2'-O-methylguanosine-3'-phosphate
  modified_base 6: mod_base = OTHER; note = 2'-O-methyladenosine-3'-phosphate
  modified_base 7: mod_base = OTHER; note = 2'-deoxy-2'-fluorocytidine-3'-phosphate
  modified_base 8: mod_base = OTHER; note = 2'-O-methylguanosine-3'-phosphate
  modified_base 9: mod_base = OTHER; note = 2'-deoxy-2'-fluorocytidine-3'-phosphate
  modified_base 10: mod_base = OTHER; note = 2'-deoxy-2'-fluorocytidine-3'-phosphate
  modified_base 11: mod_base = OTHER; note = 2'-deoxy-2'-fluoroadenosine-3'-phosphate
  modified_base 12: mod_base = OTHER; note = 2'-O-methyluridine-3'-phosphate
  modified_base 13: mod_base = OTHER; note = 2'-O-methylguanosine-3'-phosphate
  modified_base 14: mod_base = OTHER; note = 2'-O-methylcytidine-3'-phosphate
  modified_base 15: mod_base = OTHER; note = 2'-O-methylcytidine-3'-phosphate
  modified_base 16: mod_base = OTHER; note = 2'-O-methyladenosine-3'-phosphate
  modified_base 17: mod_base = OTHER; note = 2'-O-methylguanosine-3'-phosphate
  modified_base 18: mod_base = OTHER; note = 2'-O-methylguanosine-3'-phosphate
  modified_base 19: mod_base = OTHER; note = 2'-O-methyladenosine-3'-phosphate
  modified_base 20: mod_base = OTHER; note = 2'-O-methylcytidine-3'-phosphate
  modified_base 21: mod_base = OTHER; note = 2'-O-methyladenosine
ctgggacgccatgccaggaca

SEQ ID NO: 3913 - RNA, 21 nt, synthetic construct
  source 1..21: mol_type = other RNA
  modified_base 1: mod_base = OTHER; note = 2'-O-methyluridine-3'-phosphate
  modified_base 2: mod_base = OTHER; note = 2'-O-methylguanosine-3'-phosphate
  modified_base 3: mod_base = OTHER; note = 2'-O-methylguanosine-3'-phosphate
  modified_base 4: mod_base = OTHER; note = 2'-O-methylguanosine-3'-phosphate
  modified_base 5: mod_base = OTHER; note = 2'-O-methyladenosine-3'-phosphate
  modified_base 6: mod_base = OTHER; note = 2'-O-methylcytidine-3'-phosphate
  modified_base 7: mod_base = OTHER; note = 2'-deoxy-2'-fluoroguanosine-3'-phosphate
  modified_base 8: mod_base = OTHER; note = 2'-O-methylcytidine-3'-phosphate
  modified_base 9: mod_base = OTHER; note = 2'-deoxy-2'-fluorocytidine-3'-phosphate
  modified_base 10: mod_base = OTHER; note = 2'-deoxy-2'-fluoroadenosine-3'-phosphate
  modified_base 11: mod_base = OTHER; note = 2'-deoxy-2'-fluorouridine-3'-phosphate
  modified_base 12: mod_base = OTHER; note = 2'-O-methylguanosine-3'-phosphate
  modified_base 13: mod_base = OTHER; note = 2'-O-methylcytidine-3'-phosphate
  modified_base 14: mod_base = OTHER; note = 2'-O-methylcytidine-3'-phosphate
  modified_base 15: mod_base = OTHER; note = 2'-O-methyladenosine-3'-phosphate
  modified_base 16: mod_base = OTHER; note = 2'-O-methylguanosine-3'-phosphate
  modified_base 17: mod_base = OTHER; note = 2'-O-methylguanosine-3'-phosphate
  modified_base 18: mod_base = OTHER; note = 2'-O-methyladenosine-3'-phosphate
  modified_base 19: mod_base = OTHER; note = 2'-O-methylcytidine-3'-phosphate
  modified_base 20: mod_base = OTHER; note = 2'-O-methyluridine-3'-phosphate
  modified_base 21: mod_base = OTHER; note = 2'-O-methyladenosine
tgggacgccatgccaggacta

SEQ ID NO: 3914 - RNA, 21 nt, synthetic construct
  source 1..21: mol_type = other RNA
  modified_base 1: mod_base = OTHER; note = 2'-O-methylcytidine-3'-phosphate
  modified_base 2: mod_base = OTHER; note = 2'-O-methyladenosine-3'-phosphate
  modified_base 3: mod_base = OTHER; note = 2'-O-methyluridine-3'-phosphate
  modified_base 4: mod_base = OTHER; note = 2'-O-methyladenosine-3'-phosphate
  modified_base 5: mod_base = OTHER; note = 2'-O-methylguanosine-3'-phosphate
  modified_base 6: mod_base = OTHER; note = 2'-O-methyladenosine-3'-phosphate
  modified_base 7: mod_base = OTHER; note = 2'-deoxy-2'-fluorocytidine-3'-phosphate
  modified_base 8: mod_base = OTHER; note = 2'-O-methyladenosine-3'-phosphate
  modified_base 9: mod_base = OTHER; note = 2'-deoxy-2'-fluorocytidine-3'-phosphate
  modified_base 10: mod_base = OTHER; note = 2'-deoxy-2'-fluoroadenosine-3'-phosphate
  modified_base 11: mod_base = OTHER; note = 2'-deoxy-2'-fluoroguanosine-3'-phosphate
  modified_base 12: mod_base = OTHER; note = 2'-O-methylcytidine-3'-phosphate
  modified_base 13: mod_base = OTHER; note = 2'-O-methyladenosine-3'-phosphate
  modified_base 14: mod_base = OTHER; note = 2'-O-methyluridine-3'-phosphate
  modified_base 15: mod_base = OTHER; note = 2'-O-methyluridine-3'-phosphate
  modified_base 16: mod_base = OTHER; note = 2'-O-methyluridine-3'-phosphate
  modified_base 17: mod_base = OTHER; note = 2'-O-methyluridine-3'-phosphate
  modified_base 18: mod_base = OTHER; note = 2'-O-methylcytidine-3'-phosphate
  modified_base 19: mod_base = OTHER; note = 2'-O-methyladenosine-3'-phosphate
  modified_base 20: mod_base = OTHER; note = 2'-O-methylcytidine-3'-phosphate
  modified_base 21: mod_base = OTHER; note = 2'-O-methyladenosine
catagacacagcattttcaca

SEQ ID NO: 3915 - RNA, 21 nt, synthetic construct
  source 1..21: mol_type = other RNA
  modified_base 1: mod_base = OTHER; note = 2'-O-methyladenosine-3'-phosphate
  modified_base 2: mod_base = OTHER; note = 2'-O-methyluridine-3'-phosphate
  modified_base 3: mod_base = OTHER; note = 2'-O-methyladenosine-3'-phosphate
  modified_base 4: mod_base = OTHER; note = 2'-O-methylguanosine-3'-phosphate
  modified_base 5: mod_base = OTHER; note = 2'-O-methyladenosine-3'-phosphate
  modified_base 6: mod_base = OTHER; note = 2'-O-methylcytidine-3'-phosphate
  modified_base 7: mod_base = OTHER; note = 2'-deoxy-2'-fluoroadenosine-3'-phosphate
  modified_base 8: mod_base = OTHER; note = 2'-O-methylcytidine-3'-phosphate
  modified_base 9: mod_base = OTHER; note = 2'-deoxy-2'-fluoroadenosine-3'-phosphate
  modified_base 10: mod_base = OTHER; note = 2'-deoxy-2'-fluoroguanosine-3'-phosphate
  modified_base 11: mod_base = OTHER; note = 2'-deoxy-2'-fluorocytidine-3'-phosphate
  modified_base 12: mod_base = OTHER; note = 2'-O-methyladenosine-3'-phosphate
  modified_base 13: mod_base = OTHER; note = 2'-O-methyluridine-3'-phosphate
  modified_base 14: mod_base = OTHER; note = 2'-O-methyluridine-3'-phosphate
  modified_base 15: mod_base = OTHER; note = 2'-O-methyluridine-3'-phosphate
  modified_base 16: mod_base = OTHER; note = 2'-O-methyluridine-3'-phosphate
  modified_base 17: mod_base = OTHER; note = 2'-O-methylcytidine-3'-phosphate
  modified_base 18: mod_base = OTHER; note = 2'-O-methyladenosine-3'-phosphate
  modified_base 19: mod_base = OTHER; note = 2'-O-methylcytidine-3'-phosphate
  modified_base 20: mod_base = OTHER; note = 2'-O-methyluridine-3'-phosphate
  modified_base 21: mod_base = OTHER; note = 2'-O-methyladenosine
atagacacagcattttcacta

SEQ ID NO: 3916 - RNA, 21 nt, synthetic construct
  source 1..21: mol_type = other RNA
  modified_base 1: mod_base = OTHER; note = 2'-O-methyluridine-3'-phosphate
  modified_base 2: mod_base = OTHER; note = 2'-O-methyladenosine-3'-phosphate
  modified_base 3: mod_base = OTHER; note = 2'-O-methylguanosine-3'-phosphate
  modified_base 4: mod_base = OTHER; note = 2'-O-methyladenosine-3'-phosphate
  modified_base 5: mod_base = OTHER; note = 2'-O-methylcytidine-3'-phosphate
  modified_base 6: mod_base = OTHER; note = 2'-O-methyladenosine-3'-phosphate
  modified_base 7: mod_base = OTHER; note = 2'-deoxy-2'-fluorocytidine-3'-phosphate
  modified_base 8: mod_base = OTHER; note = 2'-O-methyladenosine-3'-phosphate
  modified_base 9: mod_base = OTHER; note = 2'-deoxy-2'-fluoroguanosine-3'-phosphate
  modified_base 10: mod_base = OTHER; note = 2'-deoxy-2'-fluorocytidine-3'-phosphate
  modified_base 11: mod_base = OTHER; note = 2'-deoxy-2'-fluoroadenosine-3'-phosphate
  modified_base 12: mod_base = OTHER; note = 2'-O-methyluridine-3'-phosphate
  modified_base 13: mod_base = OTHER; note = 2'-O-methyluridine-3'-phosphate
  modified_base 14: mod_base = OTHER; note = 2'-O-methyluridine-3'-phosphate
  modified_base 15: mod_base = OTHER; note = 2'-O-methyluridine-3'-phosphate
  modified_base 16: mod_base = OTHER; note = 2'-O-methylcytidine-3'-phosphate
  modified_base 17: mod_base = OTHER; note = 2'-O-methyladenosine-3'-phosphate
  modified_base 18: mod_base = OTHER; note = 2'-O-methylcytidine-3'-phosphate
  modified_base 19: mod_base = OTHER; note = 2'-O-methyluridine-3'-phosphate
  modified_base 20: mod_base = OTHER; note = 2'-O-methylcytidine-3'-phosphate
  modified_base 21: mod_base = OTHER; note = 2'-O-methyladenosine
tagacacagcattttcactca

SEQ ID NO: 3917 - RNA, 21 nt, synthetic construct
  source 1..21: mol_type = other RNA
  modified_base 1: mod_base = OTHER; note = 2'-O-methyladenosine-3'-phosphate
  modified_base 2: mod_base = OTHER; note = 2'-O-methylguanosine-3'-phosphate
  modified_base 3: mod_base = OTHER; note = 2'-O-methyladenosine-3'-phosphate
  modified_base 4: mod_base = OTHER; note = 2'-O-methylcytidine-3'-phosphate
  modified_base 5: mod_base = OTHER; note = 2'-O-methyladenosine-3'-phosphate
  modified_base 6: mod_base = OTHER; note = 2'-O-methylcytidine-3'-phosphate
  modified_base 7: mod_base = OTHER; note = 2'-deoxy-2'-fluoroadenosine-3'-phosphate
  modified_base 8: mod_base = OTHER; note = 2'-O-methylguanosine-3'-phosphate
  modified_base 9: mod_base = OTHER; note = 2'-deoxy-2'-fluorocytidine-3'-phosphate
  modified_base 10: mod_base = OTHER; note = 2'-deoxy-2'-fluoroadenosine-3'-phosphate
  modified_base 11: mod_base = OTHER; note = 2'-deoxy-2'-fluorouridine-3'-phosphate
  modified_base 12: mod_base = OTHER; note = 2'-O-methyluridine-3'-phosphate
  modified_base 13: mod_base = OTHER; note = 2'-O-methyluridine-3'-phosphate
  modified_base 14: mod_base = OTHER; note = 2'-O-methyluridine-3'-phosphate
  modified_base 15: mod_base = OTHER; note = 2'-O-methylcytidine-3'-phosphate
  modified_base 16: mod_base = OTHER; note = 2'-O-methyladenosine-3'-phosphate
  modified_base 17: mod_base = OTHER; note = 2'-O-methylcytidine-3'-phosphate
  modified_base 18: mod_base = OTHER; note = 2'-O-methyluridine-3'-phosphate
  modified_base 19: mod_base = OTHER; note = 2'-O-methylcytidine-3'-phosphate
  modified_base 20: mod_base = OTHER; note = 2'-O-methylcytidine-3'-phosphate
  modified_base 21: mod_base = OTHER; note = 2'-O-methyladenosine
agacacagcattttcactcca

SEQ ID NO: 3918 - RNA, 21 nt, synthetic construct
  source 1..21: mol_type = other RNA
  modified_base 1: mod_base = OTHER; note = 2'-O-methylguanosine-3'-phosphate
  modified_base 2: mod_base = OTHER; note = 2'-O-methyladenosine-3'-phosphate
  modified_base 3: mod_base = OTHER; note = 2'-O-methylcytidine-3'-phosphate
  modified_base 4: mod_base = OTHER; note = 2'-O-methyladenosine-3'-phosphate
  modified_base 5: mod_base = OTHER; note = 2'-O-methylcytidine-3'-phosphate
  modified_base 6: mod_base = OTHER; note = 2'-O-methyladenosine-3'-phosphate
  modified_base 7: mod_base = OTHER; note = 2'-deoxy-2'-fluoroguanosine-3'-phosphate
  modified_base 8: mod_base = OTHER; note = 2'-O-methylcytidine-3'-phosphate
  modified_base 9: mod_base = OTHER; note = 2'-deoxy-2'-fluoroadenosine-3'-phosphate
  modified_base 10: mod_base = OTHER; note = 2'-deoxy-2'-fluorouridine-3'-phosphate
  modified_base 11: mod_base = OTHER; note = 2'-deoxy-2'-fluorouridine-3'-phosphate
  modified_base 12: mod_base = OTHER; note = 2'-O-methyluridine-3'-phosphate
  modified_base 13: mod_base = OTHER; note = 2'-O-methyluridine-3'-phosphate
  modified_base 14: mod_base = OTHER; note = 2'-O-methylcytidine-3'-phosphate
  modified_base 15: mod_base = OTHER; note = 2'-O-methyladenosine-3'-phosphate
  modified_base 16: mod_base = OTHER; note = 2'-O-methylcytidine-3'-phosphate
  modified_base 17: mod_base = OTHER; note = 2'-O-methyluridine-3'-phosphate
  modified_base 18: mod_base = OTHER; note = 2'-O-methylcytidine-3'-phosphate
  modified_base 19: mod_base = OTHER; note = 2'-O-methylcytidine-3'-phosphate
  modified_base 20: mod_base = OTHER; note = 2'-O-methyladenosine-3'-phosphate
  modified_base 21: mod_base = OTHER; note = 2'-O-methyladenosine
gacacagcattttcactccaa

SEQ ID NO: 3919 - RNA, 21 nt, synthetic construct
  source 1..21: mol_type = other RNA
  modified_base 1: mod_base = OTHER; note = 2'-O-methyladenosine-3'-phosphate
  modified_base 2: mod_base = OTHER; note = 2'-O-methylcytidine-3'-phosphate
  modified_base 3: mod_base = OTHER; note = 2'-O-methyladenosine-3'-phosphate
  modified_base 4: mod_base = OTHER; note = 2'-O-methylcytidine-3'-phosphate
  modified_base 5: mod_base = OTHER; note = 2'-O-methyladenosine-3'-phosphate
  modified_base 6: mod_base = OTHER; note = 2'-O-methylguanosine-3'-phosphate
  modified_base 7: mod_base = OTHER; note = 2'-deoxy-2'-fluorocytidine-3'-phosphate
  modified_base 8: mod_base = OTHER; note = 2'-O-methyladenosine-3'-phosphate
  modified_base 9: mod_base = OTHER; note = 2'-deoxy-2'-fluorouridine-3'-phosphate
  modified_base 10: mod_base = OTHER; note = 2'-deoxy-2'-fluorouridine-3'-phosphate
  modified_base 11: mod_base = OTHER; note = 2'-deoxy-2'-fluorouridine-3'-phosphate
  modified_base 12: mod_base = OTHER; note = 2'-O-methyluridine-3'-phosphate
  modified_base 13: mod_base = OTHER; note = 2'-O-methylcytidine-3'-phosphate
  modified_base 14: mod_base = OTHER; note = 2'-O-methyladenosine-3'-phosphate
  modified_base 15: mod_base = OTHER; note = 2'-O-methylcytidine-3'-phosphate
  modified_base 16: mod_base = OTHER; note = 2'-O-methyluridine-3'-phosphate
  modified_base 17: mod_base = OTHER; note = 2'-O-methylcytidine-3'-phosphate
  modified_base 18: mod_base = OTHER; note = 2'-O-methylcytidine-3'-phosphate
  modified_base 19: mod_base = OTHER; note = 2'-O-methyladenosine-3'-phosphate
  modified_base 20: mod_base = OTHER; note = 2'-O-methylguanosine-3'-phosphate
  modified_base 21: mod_base = OTHER; note = 2'-O-methyladenosine
acacagcattttcactccaga

SEQ ID NO: 3920 - RNA, 21 nt, synthetic construct
  source 1..21: mol_type = other RNA
  modified_base 1: mod_base = OTHER; note = 2'-O-methylcytidine-3'-phosphate
  modified_base 2: mod_base = OTHER; note = 2'-O-methyladenosine-3'-phosphate
  modified_base 3: mod_base = OTHER; note = 2'-O-methylcytidine-3'-phosphate
  modified_base 4: mod_base = OTHER; note = 2'-O-methyladenosine-3'-phosphate
  modified_base 5: mod_base = OTHER; note = 2'-O-methylguanosine-3'-phosphate
  modified_base 6: mod_base = OTHER; note = 2'-O-methylcytidine-3'-phosphate
  modified_base 7: mod_base = OTHER; note = 2'-deoxy-2'-fluoroadenosine-3'-phosphate
  modified_base 8: mod_base = OTHER; note = 2'-O-methyluridine-3'-phosphate
  modified_base 9: mod_base = OTHER; note = 2'-deoxy-2'-fluorouridine-3'-phosphate
  modified_base 10: mod_base = OTHER; note = 2'-deoxy-2'-fluorouridine-3'-phosphate
  modified_base 11: mod_base = OTHER; note = 2'-deoxy-2'-fluorouridine-3'-phosphate
  modified_base 12: mod_base = OTHER; note = 2'-O-methylcytidine-3'-phosphate
  modified_base 13: mod_base = OTHER; note = 2'-O-methyladenosine-3'-phosphate
  modified_base 14: mod_base = OTHER; note = 2'-O-methylcytidine-3'-phosphate
  modified_base 15: mod_base = OTHER; note = 2'-O-methyluridine-3'-phosphate
  modified_base 16: mod_base = OTHER; note = 2'-O-methylcytidine-3'-phosphate
  modified_base 17: mod_base = OTHER; note = 2'-O-methylcytidine-3'-phosphate
  modified_base 18: mod_base = OTHER; note = 2'-O-methyladenosine-3'-phosphate
  modified_base 19: mod_base = OTHER; note = 2'-O-methylguanosine-3'-phosphate
  modified_base 20: mod_base = OTHER; note = 2'-O-methyladenosine-3'-phosphate
  modified_base 21: mod_base = OTHER; note = 2'-O-methyladenosine
cacagcattttcactccagaa

SEQ ID NO: 3921 - RNA, 21 nt, synthetic construct
  source 1..21: mol_type = other RNA
  modified_base 1: mod_base = OTHER; note = 2'-O-methyladenosine-3'-phosphate
  modified_base 2: mod_base = OTHER; note = 2'-O-methylcytidine-3'-phosphate
  modified_base 3: mod_base = OTHER; note = 2'-O-methyladenosine-3'-phosphate
  modified_base 4: mod_base = OTHER; note = 2'-O-methylguanosine-3'-phosphate
  modified_base 5: mod_base = OTHER; note = 2'-O-methylcytidine-3'-phosphate
  modified_base 6: mod_base = OTHER; note = 2'-O-methyladenosine-3'-phosphate
  modified_base 7: mod_base = OTHER; note = 2'-deoxy-2'-fluorouridine-3'-phosphate
  modified_base 8: mod_base = OTHER; note = 2'-O-methyluridine-3'-phosphate
  modified_base 9: mod_base = OTHER; note = 2'-deoxy-2'-fluorouridine-3'-phosphate
  modified_base 10: mod_base = OTHER; note = 2'-deoxy-2'-fluorouridine-3'-phosphate
  modified_base 11: mod_base = OTHER; note = 2'-deoxy-2'-fluorocytidine-3'-phosphate
  modified_base 12: mod_base = OTHER; note = 2'-O-methyladenosine-3'-phosphate
  modified_base 13: mod_base = OTHER; note = 2'-O-methylcytidine-3'-phosphate
  modified_base 14: mod_base = OTHER; note = 2'-O-methyluridine-3'-phosphate
  modified_base 15: mod_base = OTHER; note = 2'-O-methylcytidine-3'-phosphate
  modified_base 16: mod_base = OTHER; note = 2'-O-methylcytidine-3'-phosphate
  modified_base 17: mod_base = OTHER; note = 2'-O-methyladenosine-3'-phosphate
  modified_base 18: mod_base = OTHER; note = 2'-O-methylguanosine-3'-phosphate
  modified_base 19: mod_base = OTHER; note = 2'-O-methyladenosine-3'-phosphate
  modified_base 20: mod_base = OTHER; note = 2'-O-methylguanosine-3'-phosphate
  modified_base 21: mod_base = OTHER; note = 2'-O-methyladenosine
acagcattttcactccagaga

SEQ ID NO: 3922 - RNA, 21 nt, synthetic construct
  source 1..21: mol_type = other RNA
  modified_base 1: mod_base = OTHER; note = 2'-O-methylcytidine-3'-phosphate
  modified_base 2: mod_base = OTHER; note = 2'-O-methyladenosine-3'-phosphate
  modified_base 3: mod_base = OTHER; note = 2'-O-methylguanosine-3'-phosphate
  modified_base 4: mod_base = OTHER; note = 2'-O-methylcytidine-3'-phosphate
  modified_base 5: mod_base = OTHER; note = 2'-O-methyladenosine-3'-phosphate
  modified_base 6: mod_base = OTHER; note = 2'-O-methyluridine-3'-phosphate
  modified_base 7: mod_base = OTHER; note = 2'-deoxy-2'-fluorouridine-3'-phosphate
  modified_base 8: mod_base = OTHER; note = 2'-O-methyluridine-3'-phosphate
  modified_base 9: mod_base = OTHER; note = 2'-deoxy-2'-fluorouridine-3'-phosphate
  modified_base 10: mod_base = OTHER; note = 2'-deoxy-2'-fluorocytidine-3'-phosphate
  modified_base 11: mod_base = OTHER; note = 2'-deoxy-2'-fluoroadenosine-3'-phosphate
  modified_base 12: mod_base = OTHER; note = 2'-O-methylcytidine-3'-phosphate
  modified_base 13: mod_base = OTHER; note = 2'-O-methyluridine-3'-phosphate
  modified_base 14: mod_base = OTHER; note = 2'-O-methylcytidine-3'-phosphate
  modified_base 15: mod_base = OTHER; note = 2'-O-methylcytidine-3'-phosphate
  modified_base 16: mod_base = OTHER; note = 2'-O-methyladenosine-3'-phosphate
  modified_base 17: mod_base = OTHER; note = 2'-O-methylguanosine-3'-phosphate
  modified_base 18: mod_base = OTHER; note = 2'-O-methyladenosine-3'-phosphate
  modified_base 19: mod_base = OTHER; note = 2'-O-methylguanosine-3'-phosphate
  modified_base 20: mod_base = OTHER; note = 2'-O-methyladenosine-3'-phosphate
  modified_base 21: mod_base = OTHER; note = 2'-O-methyladenosine
cagcattttcactccagagaa

SEQ ID NO: 3923 - RNA, 21 nt, synthetic construct
  source 1..21: mol_type = other RNA
  modified_base 1: mod_base = OTHER; note = 2'-O-methyladenosine-3'-phosphate
  modified_base 2: mod_base = OTHER; note = 2'-O-methylguanosine-3'-phosphate
  modified_base 3: mod_base = OTHER; note = 2'-O-methylcytidine-3'-phosphate
  modified_base 4: mod_base = OTHER; note = 2'-O-methyladenosine-3'-phosphate
  modified_base 5: mod_base = OTHER; note = 2'-O-methyluridine-3'-phosphate
  modified_base 6: mod_base = OTHER; note = 2'-O-methyluridine-3'-phosphate
  modified_base 7: mod_base = OTHER; note = 2'-deoxy-2'-fluorouridine-3'-phosphate
  modified_base 8: mod_base = OTHER; note = 2'-O-methyluridine-3'-phosphate
  modified_base 9: mod_base = OTHER; note = 2'-deoxy-2'-fluorocytidine-3'-phosphate
  modified_base 10: mod_base = OTHER; note = 2'-deoxy-2'-fluoroadenosine-3'-phosphate
  modified_base 11: mod_base = OTHER; note = 2'-deoxy-2'-fluorocytidine-3'-phosphate
  modified_base 12: mod_base = OTHER; note = 2'-O-methyluridine-3'-phosphate
  modified_base 13: mod_base = OTHER; note = 2'-O-methylcytidine-3'-phosphate
  modified_base 14: mod_base = OTHER; note = 2'-O-methylcytidine-3'-phosphate
  modified_base 15: mod_base = OTHER; note = 2'-O-methyladenosine-3'-phosphate
  modified_base 16: mod_base = OTHER; note = 2'-O-methylguanosine-3'-phosphate
  modified_base 17: mod_base = OTHER; note = 2'-O-methyladenosine-3'-phosphate
  modified_base 18: mod_base = OTHER; note = 2'-O-methylguanosine-3'-phosphate
  modified_base 19: mod_base = OTHER; note = 2'-O-methyladenosine-3'-phosphate
  modified_base 20: mod_base = OTHER; note = 2'-O-methylcytidine-3'-phosphate
  modified_base 21: mod_base = OTHER; note = 2'-O-methyladenosine
agcattttcactccagagaca

SEQ ID NO: 3924 - RNA, 21 nt, synthetic construct
  source 1..21: mol_type = other RNA
  modified_base 1: mod_base = OTHER; note = 2'-O-methylguanosine-3'-phosphate
  modified_base 2: mod_base = OTHER; note = 2'-O-methylcytidine-3'-phosphate
  modified_base 3: mod_base = OTHER; note = 2'-O-methyladenosine-3'-phosphate
  modified_base 4: mod_base = OTHER; note = 2'-O-methyluridine-3'-phosphate
  modified_base 5: mod_base = OTHER; note = 2'-O-methyluridine-3'-phosphate
  modified_base 6: mod_base = OTHER; note = 2'-O-methyluridine-3'-phosphate
  modified_base 7: mod_base = OTHER; note = 2'-deoxy-2'-fluorouridine-3'-phosphate
  modified_base 8: mod_base = OTHER; note = 2'-O-methylcytidine-3'-phosphate
  modified_base 9: mod_base = OTHER; note = 2'-deoxy-2'-fluoroadenosine-3'-phosphate
  modified_base 10: mod_base = OTHER; note = 2'-deoxy-2'-fluorocytidine-3'-phosphate
  modified_base 11: mod_base = OTHER; note = 2'-deoxy-2'-fluorouridine-3'-phosphate
  modified_base 12: mod_base = OTHER; note = 2'-O-methylcytidine-3'-phosphate
  modified_base 13: mod_base = OTHER; note = 2'-O-methylcytidine-3'-phosphate
  modified_base 14: mod_base = OTHER; note = 2'-O-methyladenosine-3'-phosphate
  modified_base 15: mod_base = OTHER; note = 2'-O-methylguanosine-3'-phosphate
  modified_base 16: mod_base = OTHER; note = 2'-O-methyladenosine-3'-phosphate
  modified_base 17: mod_base = OTHER; note = 2'-O-methylguanosine-3'-phosphate
  modified_base 18: mod_base = OTHER; note = 2'-O-methyladenosine-3'-phosphate
  modified_base 19: mod_base = OTHER; note = 2'-O-methylcytidine-3'-phosphate
  modified_base 20: mod_base = OTHER; note = 2'-O-methyladenosine-3'-phosphate
  modified_base 21: mod_base = OTHER; note = 2'-O-methyladenosine
gcattttcactccagagacaa

SEQ ID NO: 3925 - RNA, 21 nt, synthetic construct
  source 1..21: mol_type = other RNA
  modified_base 1: mod_base = OTHER; note = 2'-O-methylcytidine-3'-phosphate
  modified_base 2: mod_base = OTHER; note = 2'-O-methyladenosine-3'-phosphate
  modified_base 3: mod_base = OTHER; note = 2'-O-methyluridine-3'-phosphate
  modified_base 4: mod_base = OTHER; note = 2'-O-methyluridine-3'-phosphate
  modified_base 5: mod_base = OTHER; note = 2'-O-methyluridine-3'-phosphate
  modified_base 6: mod_base = OTHER; note = 2'-O-methyluridine-3'-phosphate
  modified_base 7: mod_base = OTHER; note = 2'-deoxy-2'-fluorocytidine-3'-phosphate
  modified_base 8: mod_base = OTHER; note = 2'-O-methyladenosine-3'-phosphate
  modified_base 9: mod_base = OTHER; note = 2'-deoxy-2'-fluorocytidine-3'-phosphate
  modified_base 10: mod_base = OTHER; note = 2'-deoxy-2'-fluorouridine-3'-phosphate
  modified_base 11: mod_base = OTHER; note = 2'-deoxy-2'-fluorocytidine-3'-phosphate
  modified_base 12: mod_base = OTHER; note = 2'-O-methylcytidine-3'-phosphate
  modified_base 13: mod_base = OTHER; note = 2'-O-methyladenosine-3'-phosphate
  modified_base 14: mod_base = OTHER; note = 2'-O-methylguanosine-3'-phosphate
  modified_base 15: mod_base = OTHER; note = 2'-O-methyladenosine-3'-phosphate
  modified_base 16: mod_base = OTHER; note = 2'-O-methylguanosine-3'-phosphate
  modified_base 17: mod_base = OTHER; note = 2'-O-methyladenosine-3'-phosphate
  modified_base 18: mod_base = OTHER; note = 2'-O-methylcytidine-3'-phosphate
  modified_base 19: mod_base = OTHER; note = 2'-O-methyladenosine-3'-phosphate
  modified_base 20: mod_base = OTHER; note = 2'-O-methyladenosine-3'-phosphate
  modified_base 21: mod_base = OTHER; note = 2'-O-methyladenosine
cattttcactccagagacaaa

SEQ ID NO: 3926 - RNA, 21 nt, synthetic construct
  source 1..21: mol_type = other RNA
  modified_base 1: mod_base = OTHER; note = 2'-O-methyladenosine-3'-phosphate
  modified_base 2: mod_base = OTHER; note = 2'-O-methyluridine-3'-phosphate
  modified_base 3: mod_base = OTHER; note = 2'-O-methyluridine-3'-phosphate
  modified_base 4: mod_base = OTHER; note = 2'-O-methyluridine-3'-phosphate
  modified_base 5: mod_base = OTHER; note = 2'-O-methyluridine-3'-phosphate
  modified_base 6: mod_base = OTHER; note = 2'-O-methylcytidine-3'-phosphate
  modified_base 7: mod_base = OTHER; note = 2'-deoxy-2'-fluoroadenosine-3'-phosphate
  modified_base 8: mod_base = OTHER; note = 2'-O-methylcytidine-3'-phosphate
  modified_base 9: mod_base = OTHER; note = 2'-deoxy-2'-fluorouridine-3'-phosphate
  modified_base 10: mod_base = OTHER; note = 2'-deoxy-2'-fluorocytidine-3'-phosphate
  modified_base 11: mod_base = OTHER; note = 2'-deoxy-2'-fluorocytidine-3'-phosphate
  modified_base 12: mod_base = OTHER; note = 2'-O-methyladenosine-3'-phosphate
  modified_base 13: mod_base = OTHER; note = 2'-O-methylguanosine-3'-phosphate
  modified_base 14: mod_base = OTHER; note = 2'-O-methyladenosine-3'-phosphate
  modified_base 15: mod_base = OTHER; note = 2'-O-methylguanosine-3'-phosphate
  modified_base 16: mod_base = OTHER; note = 2'-O-methyladenosine-3'-phosphate
  modified_base 17: mod_base = OTHER; note = 2'-O-methylcytidine-3'-phosphate
  modified_base 18: mod_base = OTHER; note = 2'-O-methyladenosine-3'-phosphate
  modified_base 19: mod_base = OTHER; note = 2'-O-methyladenosine-3'-phosphate
  modified_base 20: mod_base = OTHER; note = 2'-O-methyladenosine-3'-phosphate
  modified_base 21: mod_base = OTHER; note = 2'-O-methyladenosine
attttcactccagagacaaaa

SEQ ID NO: 3927 - RNA, 21 nt, synthetic construct
  source 1..21: mol_type = other RNA
  modified_base 1: mod_base = OTHER; note = 2'-O-methyluridine-3'-phosphate
  modified_base 2: mod_base = OTHER; note = 2'-O-methyluridine-3'-phosphate
  modified_base 3: mod_base = OTHER; note = 2'-O-methyluridine-3'-phosphate
  modified_base 4: mod_base = OTHER; note = 2'-O-methyluridine-3'-phosphate
  modified_base 5: mod_base = OTHER; note = 2'-O-methylcytidine-3'-phosphate
  modified_base 6: mod_base = OTHER; note = 2'-O-methyladenosine-3'-phosphate
  modified_base 7: mod_base = OTHER; note = 2'-deoxy-2'-fluorocytidine-3'-phosphate
  modified_base 8: mod_base = OTHER; note = 2'-O-methyluridine-3'-phosphate
  modified_base 9: mod_base = OTHER; note = 2'-deoxy-2'-fluorocytidine-3'-phosphate
  modified_base 10: mod_base = OTHER; note = 2'-deoxy-2'-fluorocytidine-3'-phosphate
  modified_base 11: mod_base = OTHER; note = 2'-deoxy-2'-fluoroadenosine-3'-phosphate
  modified_base 12: mod_base = OTHER; note = 2'-O-methylguanosine-3'-phosphate
  modified_base 13: mod_base = OTHER; note = 2'-O-methyladenosine-3'-phosphate
  modified_base 14: mod_base = OTHER; note = 2'-O-methylguanosine-3'-phosphate
  modified_base 15: mod_base = OTHER; note = 2'-O-methyladenosine-3'-phosphate
  modified_base 16: mod_base = OTHER; note = 2'-O-methylcytidine-3'-phosphate
  modified_base 17: mod_base = OTHER; note = 2'-O-methyladenosine-3'-phosphate
  modified_base 18: mod_base = OTHER; note = 2'-O-methyladenosine-3'-phosphate
  modified_base 19: mod_base = OTHER; note = 2'-O-methyladenosine-3'-phosphate
  modified_base 20: mod_base = OTHER; note = 2'-O-methyluridine-3'-phosphate
  modified_base 21: mod_base = OTHER; note = 2'-O-methyladenosine
ttttcactccagagacaaata

SEQ ID NO: 3928 - RNA, 21 nt, synthetic construct
  source 1..21: mol_type = other RNA
  modified_base 1: mod_base = OTHER; note = 2'-O-methyluridine-3'-phosphate
  modified_base 2: mod_base = OTHER; note = 2'-O-methyluridine-3'-phosphate
  modified_base 3: mod_base = OTHER; note = 2'-O-methyluridine-3'-phosphate
  modified_base 4: mod_base = OTHER; note = 2'-O-methylcytidine-3'-phosphate
  modified_base 5: mod_base = OTHER; note = 2'-O-methyladenosine-3'-phosphate
  modified_base 6: mod_base = OTHER; note = 2'-O-methylcytidine-3'-phosphate
  modified_base 7: mod_base = OTHER; note = 2'-deoxy-2'-fluorouridine-3'-phosphate
  modified_base 8: mod_base = OTHER; note = 2'-O-methylcytidine-3'-phosphate
  modified_base 9: mod_base = OTHER; note = 2'-deoxy-2'-fluorocytidine-3'-phosphate
  modified_base 10: mod_base = OTHER; note = 2'-deoxy-2'-fluoroadenosine-3'-phosphate
  modified_base 11: mod_base = OTHER; note = 2'-deoxy-2'-fluoroguanosine-3'-phosphate
  modified_base 12: mod_base = OTHER; note = 2'-O-methyladenosine-3'-phosphate
  modified_base 13: mod_base = OTHER; note = 2'-O-methylguanosine-3'-phosphate
  modified_base 14: mod_base = OTHER; note = 2'-O-methyladenosine-3'-phosphate
  modified_base 15: mod_base = OTHER; note = 2'-O-methylcytidine-3'-phosphate
  modified_base 16: mod_base = OTHER; note = 2'-O-methyladenosine-3'-phosphate
  modified_base 17: mod_base = OTHER; note = 2'-O-methyladenosine-3'-phosphate
  modified_base 18: mod_base = OTHER; note = 2'-O-methyladenosine-3'-phosphate
  modified_base 19: mod_base = OTHER; note = 2'-O-methyluridine-3'-phosphate
  modified_base 20: mod_base = OTHER; note = 2'-O-methylcytidine-3'-phosphate
  modified_base 21: mod_base = OTHER; note = 2'-O-methyladenosine
tttcactccagagacaaatca

SEQ ID NO: 3929 - RNA, 21 nt, synthetic construct
  source 1..21: mol_type = other RNA
  modified_base 1: mod_base = OTHER; note = 2'-O-methyluridine-3'-phosphate
  modified_base 2: mod_base = OTHER; note = 2'-O-methyluridine-3'-phosphate
  modified_base 3: mod_base = OTHER; note = 2'-O-methylcytidine-3'-phosphate
  modified_base 4: mod_base = OTHER; note = 2'-O-methyladenosine-3'-phosphate
  modified_base 5: mod_base = OTHER; note = 2'-O-methylcytidine-3'-phosphate
  modified_base 6: mod_base = OTHER; note = 2'-O-methyluridine-3'-phosphate
  modified_base 7: mod_base = OTHER; note = 2'-deoxy-2'-fluorocytidine-3'-phosphate
  modified_base 8: mod_base = OTHER; note = 2'-O-methylcytidine-3'-phosphate
  modified_base 9: mod_base = OTHER; note = 2'-deoxy-2'-fluoroadenosine-3'-phosphate
  modified_base 10: mod_base = OTHER; note = 2'-deoxy-2'-fluoroguanosine-3'-phosphate
  modified_base 11: mod_base = OTHER; note = 2'-deoxy-2'-fluoroadenosine-3'-phosphate
  modified_base 12: mod_base = OTHER; note = 2'-O-methylguanosine-3'-phosphate
  modified_base 13: mod_base = OTHER; note = 2'-O-methyladenosine-3'-phosphate
  modified_base 14: mod_base = OTHER; note = 2'-O-methylcytidine-3'-phosphate
  modified_base 15: mod_base = OTHER; note = 2'-O-methyladenosine-3'-phosphate
  modified_base 16: mod_base = OTHER; note = 2'-O-methyladenosine-3'-phosphate
  modified_base 17: mod_base = OTHER; note = 2'-O-methyladenosine-3'-phosphate
  modified_base 18: mod_base = OTHER; note = 2'-O-methyluridine-3'-phosphate
  modified_base 19: mod_base = OTHER; note = 2'-O-methylcytidine-3'-phosphate
  modified_base 20: mod_base = OTHER; note = 2'-O-methylcytidine-3'-phosphate
  modified_base 21: mod_base = OTHER; note = 2'-O-methyladenosine
ttcactccagagacaaatcca

SEQ ID NO: 3930 - RNA, 21 nt, synthetic construct
  source 1..21: mol_type = other RNA
  modified_base 1: mod_base = OTHER; note = 2'-O-methyluridine-3'-phosphate
  modified_base 2: mod_base = OTHER; note = 2'-O-methylcytidine-3'-phosphate
  modified_base 3: mod_base = OTHER; note = 2'-O-methyladenosine-3'-phosphate
  modified_base 4: mod_base = OTHER; note = 2'-O-methylcytidine-3'-phosphate
  modified_base 5: mod_base = OTHER; note = 2'-O-methyluridine-3'-phosphate
  modified_base 6: mod_base = OTHER; note = 2'-O-methylcytidine-3'-phosphate
  modified_base 7: mod_base = OTHER; note = 2'-deoxy-2'-fluorocytidine-3'-phosphate
  modified_base 8: mod_base = OTHER; note = 2'-O-methyladenosine-3'-phosphate
  modified_base 9: mod_base = OTHER; note = 2'-deoxy-2'-fluoroguanosine-3'-phosphate
  modified_base 10: mod_base = OTHER; note = 2'-deoxy-2'-fluoroadenosine-3'-phosphate
  modified_base 11: mod_base = OTHER; note = 2'-deoxy-2'-fluoroguanosine-3'-phosphate
  modified_base 12: mod_base = OTHER; note = 2'-O-methyladenosine-3'-phosphate
  modified_base 13: mod_base = OTHER; note = 2'-O-methylcytidine-3'-phosphate
  modified_base 14: mod_base = OTHER; note = 2'-O-methyladenosine-3'-phosphate
  modified_base 15: mod_base = OTHER; note = 2'-O-methyladenosine-3'-phosphate
  modified_base 16: mod_base = OTHER; note = 2'-O-methyladenosine-3'-phosphate
  modified_base 17: mod_base = OTHER; note = 2'-O-methyluridine-3'-phosphate
  modified_base 18: mod_base = OTHER; note = 2'-O-methylcytidine-3'-phosphate
  modified_base 19: mod_base = OTHER; note = 2'-O-methylcytidine-3'-phosphate
  modified_base 20: mod_base = OTHER; note = 2'-O-methyladenosine-3'-phosphate
  modified_base 21: mod_base = OTHER; note = 2'-O-methyladenosine
tcactccagagacaaatccaa

SEQ ID NO: 3931 - RNA, 21 nt, synthetic construct
  source 1..21: mol_type = other RNA
  modified_base 1: mod_base = OTHER; note = 2'-O-methyladenosine-3'-phosphate
  modified_base 2: mod_base = OTHER; note = 2'-O-methylcytidine-3'-phosphate
  modified_base 3: mod_base = OTHER; note = 2'-O-methylguanosine-3'-phosphate
  modified_base 4: mod_base = OTHER; note = 2'-O-methylguanosine-3'-phosphate
  modified_base 5: mod_base = OTHER; note = 2'-O-methylguanosine-3'-phosphate
  modified_base 6: mod_base = OTHER; note = 2'-O-methylcytidine-3'-phosphate
  modified_base 7: mod_base = OTHER; note = 2'-deoxy-2'-fluoroguanosine-3'-phosphate
  modified_base 8: mod_base = OTHER; note = 2'-O-methylguanosine-3'-phosphate
  modified_base 9: mod_base = OTHER; note = 2'-deoxy-2'-fluoroguanosine-3'-phosphate
  modified_base 10: mod_base = OTHER; note = 2'-deoxy-2'-fluorouridine-3'-phosphate
  modified_base 11: mod_base = OTHER; note = 2'-deoxy-2'-fluorocytidine-3'-phosphate
  modified_base 12: mod_base = OTHER; note = 2'-O-methyluridine-3'-phosphate
  modified_base 13: mod_base = OTHER; note = 2'-O-methylguanosine-3'-phosphate
  modified_base 14: mod_base = OTHER; note = 2'-O-methylguanosine-3'-phosphate
  modified_base 15: mod_base = OTHER; note = 2'-O-methyladenosine-3'-phosphate
  modified_base 16: mod_base = OTHER; note = 2'-O-methyladenosine-3'-phosphate
  modified_base 17: mod_base = OTHER; note = 2'-O-methyladenosine-3'-phosphate
  modified_base 18: mod_base = OTHER; note = 2'-O-methyladenosine-3'-phosphate
  modified_base 19: mod_base = OTHER; note = 2'-O-methyladenosine-3'-phosphate
  modified_base 20: mod_base = OTHER; note = 2'-O-methyladenosine-3'-phosphate
  modified_base 21: mod_base = OTHER; note = 2'-O-methyladenosine
acgggcgggtctggaaaaaaa

SEQ ID NO: 3932 - RNA, 21 nt, synthetic construct
  source 1..21: mol_type = other RNA
  modified_base 1: mod_base = OTHER; note = 2'-O-methylcytidine-3'-phosphate
  modified_base 2: mod_base = OTHER; note = 2'-O-methylguanosine-3'-phosphate
  modified_base 3: mod_base = OTHER; note = 2'-O-methylguanosine-3'-phosphate
  modified_base 4: mod_base = OTHER; note = 2'-O-methylguanosine-3'-phosphate
  modified_base 5: mod_base = OTHER; note = 2'-O-methylcytidine-3'-phosphate
  modified_base 6: mod_base = OTHER; note = 2'-O-methylguanosine-3'-phosphate
  modified_base 7: mod_base = OTHER; note = 2'-deoxy-2'-fluoroguanosine-3'-phosphate
  modified_base 8: mod_base = OTHER; note = 2'-O-methylguanosine-3'-phosphate
  modified_base 9: mod_base = OTHER; note = 2'-deoxy-2'-fluorouridine-3'-phosphate
  modified_base 10: mod_base = OTHER; note = 2'-deoxy-2'-fluorocytidine-3'-phosphate
  modified_base 11: mod_base = OTHER; note = 2'-deoxy-2'-fluorouridine-3'-phosphate
  modified_base 12: mod_base = OTHER; note = 2'-O-methylguanosine-3'-phosphate
  modified_base 13: mod_base = OTHER; note = 2'-O-methylguanosine-3'-phosphate
  modified_base 14: mod_base = OTHER; note = 2'-O-methyladenosine-3'-phosphate
  modified_base 15: mod_base = OTHER; note = 2'-O-methyladenosine-3'-phosphate
  modified_base 16: mod_base = OTHER; note = 2'-O-methyladenosine-3'-phosphate
  modified_base 17: mod_base = OTHER; note = 2'-O-methyladenosine-3'-phosphate
  modified_base 18: mod_base = OTHER; note = 2'-O-methyladenosine-3'-phosphate
  modified_base 19: mod_base = OTHER; note = 2'-O-methyladenosine-3'-phosphate
  modified_base 20: mod_base = OTHER; note = 2'-O-methyladenosine-3'-phosphate
  modified_base 21: mod_base = OTHER; note = 2'-O-methyladenosine
cgggcgggtctggaaaaaaaa

SEQ ID NO: 3933 - RNA, 21 nt, synthetic construct
  source 1..21: mol_type = other RNA
  modified_base 1: mod_base = OTHER; note = 2'-O-methylguanosine-3'-phosphate
  modified_base 2: mod_base = OTHER; note = 2'-O-methylguanosine-3'-phosphate
  modified_base 3: mod_base = OTHER; note = 2'-O-methylguanosine-3'-phosphate
  modified_base 4: mod_base = OTHER; note = 2'-O-methylcytidine-3'-phosphate
  modified_base 5: mod_base = OTHER; note = 2'-O-methylguanosine-3'-phosphate
  modified_base 6: mod_base = OTHER; note = 2'-O-methylguanosine-3'-phosphate
  modified_base 7: mod_base = OTHER; note = 2'-deoxy-2'-fluoroguanosine-3'-phosphate
  modified_base 8: mod_base = OTHER; note = 2'-O-methyluridine-3'-phosphate
  modified_base 9: mod_base = OTHER; note = 2'-deoxy-2'-fluorocytidine-3'-phosphate
  modified_base 10: mod_base = OTHER; note = 2'-deoxy-2'-fluorouridine-3'-phosphate
  modified_base 11: mod_base = OTHER; note = 2'-deoxy-2'-fluoroguanosine-3'-phosphate
  modified_base 12: mod_base = OTHER; note = 2'-O-methylguanosine-3'-phosphate
  modified_base 13: mod_base = OTHER; note = 2'-O-methyladenosine-3'-phosphate
  modified_base 14: mod_base = OTHER; note = 2'-O-methyladenosine-3'-phosphate
  modified_base 15: mod_base = OTHER; note = 2'-O-methyladenosine-3'-phosphate
  modified_base 16: mod_base = OTHER; note = 2'-O-methyladenosine-3'-phosphate
  modified_base 17: mod_base = OTHER; note = 2'-O-methyladenosine-3'-phosphate
  modified_base 18: mod_base = OTHER; note = 2'-O-methyladenosine-3'-phosphate
  modified_base 19: mod_base = OTHER; note = 2'-O-methyladenosine-3'-phosphate
  modified_base 20: mod_base = OTHER; note = 2'-O-methyluridine-3'-phosphate
  modified_base 21: mod_base = OTHER; note = 2'-O-methyladenosine
gggcgggtctggaaaaaaata

SEQ ID NO: 3934 - RNA, 21 nt, synthetic construct
  source 1..21: mol_type = other RNA
  modified_base 1: mod_base = OTHER; note = 2'-O-methylguanosine-3'-phosphate
  modified_base 2: mod_base = OTHER; note = 2'-O-methylguanosine-3'-phosphate
  modified_base 3: mod_base = OTHER; note = 2'-O-methylcytidine-3'-phosphate
  modified_base 4: mod_base = OTHER; note = 2'-O-methylguanosine-3'-phosphate
  modified_base 5: mod_base = OTHER; note = 2'-O-methylguanosine-3'-phosphate
  modified_base 6: mod_base = OTHER; note = 2'-O-methylguanosine-3'-phosphate
  modified_base 7: mod_base = OTHER; note = 2'-deoxy-2'-fluorouridine-3'-phosphate
  modified_base 8: mod_base = OTHER; note = 2'-O-methylcytidine-3'-phosphate
  modified_base 9: mod_base = OTHER; note = 2'-deoxy-2'-fluorouridine-3'-phosphate
  modified_base 10: mod_base = OTHER; note = 2'-deoxy-2'-fluoroguanosine-3'-phosphate
  modified_base 11: mod_base = OTHER; note = 2'-deoxy-2'-fluoroguanosine-3'-phosphate
  modified_base 12: mod_base = OTHER; note = 2'-O-methyladenosine-3'-phosphate
  modified_base 13: mod_base = OTHER; note = 2'-O-methyladenosine-3'-phosphate
  modified_base 14: mod_base = OTHER; note = 2'-O-methyladenosine-3'-phosphate
  modified_base 15: mod_base = OTHER; note = 2'-O-methyladenosine-3'-phosphate
  modified_base 16: mod_base = OTHER; note = 2'-O-methyladenosine-3'-phosphate
  modified_base 17: mod_base = OTHER; note = 2'-O-methyladenosine-3'-phosphate
  modified_base 18: mod_base = OTHER; note = 2'-O-methyladenosine-3'-phosphate
  modified_base 19: mod_base = OTHER; note = 2'-O-methyluridine-3'-phosphate
  modified_base 20: mod_base = OTHER; note = 2'-O-methyluridine-3'-phosphate
  modified_base 21: mod_base = OTHER; note = 2'-O-methyladenosine
ggcgggtctggaaaaaaatta

SEQ ID NO: 3935 - RNA, 21 nt, synthetic construct
  source 1..21: mol_type = other RNA
  modified_base 1: mod_base = OTHER; note = 2'-O-methylguanosine-3'-phosphate
  modified_base 2: mod_base = OTHER; note = 2'-O-methylcytidine-3'-phosphate
  modified_base 3: mod_base = OTHER; note = 2'-O-methylguanosine-3'-phosphate
  modified_base 4: mod_base = OTHER; note = 2'-O-methylguanosine-3'-phosphate
  modified_base 5: mod_base = OTHER; note = 2'-O-methylguanosine-3'-phosphate
  modified_base 6: mod_base = OTHER; note = 2'-O-methyluridine-3'-phosphate
  modified_base 7: mod_base = OTHER; note = 2'-deoxy-2'-fluorocytidine-3'-phosphate
  modified_base 8: mod_base = OTHER; note = 2'-O-methyluridine-3'-phosphate
  modified_base 9: mod_base = OTHER; note = 2'-deoxy-2'-fluoroguanosine-3'-phosphate
  modified_base 10: mod_base = OTHER; note = 2'-deoxy-2'-fluoroguanosine-3'-phosphate
  modified_base 11: mod_base = OTHER; note = 2'-deoxy-2'-fluoroadenosine-3'-phosphate
  modified_base 12: mod_base = OTHER; note = 2'-O-methyladenosine-3'-phosphate
  modified_base 13: mod_base = OTHER; note = 2'-O-methyladenosine-3'-phosphate
  modified_base 14: mod_base = OTHER; note = 2'-O-methyladenosine-3'-phosphate
  modified_base 15: mod_base = OTHER; note = 2'-O-methyladenosine-3'-phosphate
  modified_base 16: mod_base = OTHER; note = 2'-O-methyladenosine-3'-phosphate
  modified_base 17: mod_base = OTHER; note = 2'-O-methyladenosine-3'-phosphate
  modified_base 18: mod_base = OTHER; note = 2'-O-methyluridine-3'-phosphate
  modified_base 19: mod_base = OTHER; note = 2'-O-methyluridine-3'-phosphate
  modified_base 20: mod_base = OTHER; note = 2'-O-methyladenosine-3'-phosphate
  modified_base 21: mod_base = OTHER; note = 2'-O-methyladenosine
gcgggtctggaaaaaaattaa

SEQ ID NO: 3936 - RNA, 21 nt, synthetic construct
  source 1..21: mol_type = other RNA
  modified_base 1: mod_base = OTHER; note = 2'-O-methylcytidine-3'-phosphate
  modified_base 2: mod_base = OTHER; note = 2'-O-methylguanosine-3'-phosphate
  modified_base 3: mod_base = OTHER; note = 2'-O-methylguanosine-3'-phosphate
  modified_base 4: mod_base = OTHER; note = 2'-O-methylguanosine-3'-phosphate
  modified_base 5: mod_base = OTHER; note = 2'-O-methyluridine-3'-phosphate
  modified_base 6: mod_base = OTHER; note = 2'-O-methylcytidine-3'-phosphate
  modified_base 7: mod_base = OTHER; note = 2'-deoxy-2'-fluorouridine-3'-phosphate
  modified_base 8: mod_base = OTHER; note = 2'-O-methylguanosine-3'-phosphate
  modified_base 9: mod_base = OTHER; note = 2'-deoxy-2'-fluoroguanosine-3'-phosphate
  modified_base 10: mod_base = OTHER; note = 2'-deoxy-2'-fluoroadenosine-3'-phosphate
  modified_base 11: mod_base = OTHER; note = 2'-deoxy-2'-fluoroadenosine-3'-phosphate
  modified_base 12: mod_base = OTHER; note = 2'-O-methyladenosine-3'-phosphate
  modified_base 13: mod_base = OTHER; note = 2'-O-methyladenosine-3'-phosphate
  modified_base 14: mod_base = OTHER; note = 2'-O-methyladenosine-3'-phosphate
  modified_base 15: mod_base = OTHER; note = 2'-O-methyladenosine-3'-phosphate
  modified_base 16: mod_base = OTHER; note = 2'-O-methyladenosine-3'-phosphate
  modified_base 17: mod_base = OTHER; note = 2'-O-methyluridine-3'-phosphate
  modified_base 18: mod_base = OTHER; note = 2'-O-methyluridine-3'-phosphate
  modified_base 19: mod_base = OTHER; note = 2'-O-methyladenosine-3'-phosphate
  modified_base 20: mod_base = OTHER; note = 2'-O-methylcytidine-3'-phosphate
  modified_base 21: mod_base = OTHER; note = 2'-O-methyladenosine
cgggtctggaaaaaaattaca

SEQ ID NO: 3937 - RNA, 21 nt, synthetic construct
  source 1..21: mol_type = other RNA
  modified_base 1: mod_base = OTHER; note = 2'-O-methylguanosine-3'-phosphate
  modified_base 2: mod_base = OTHER; note = 2'-O-methylguanosine-3'-phosphate
  modified_base 3: mod_base = OTHER; note = 2'-O-methylguanosine-3'-phosphate
  modified_base 4: mod_base = OTHER; note = 2'-O-methyluridine-3'-phosphate
  modified_base 5: mod_base = OTHER; note = 2'-O-methylcytidine-3'-phosphate
  modified_base 6: mod_base = OTHER; note = 2'-O-methyluridine-3'-phosphate
  modified_base 7: mod_base = OTHER; note = 2'-deoxy-2'-fluoroguanosine-3'-phosphate
  modified_base 8: mod_base = OTHER; note = 2'-O-methylguanosine-3'-phosphate
  modified_base 9: mod_base = OTHER; note = 2'-deoxy-2'-fluoroadenosine-3'-phosphate
  modified_base 10: mod_base = OTHER; note = 2'-deoxy-2'-fluoroadenosine-3'-phosphate
  modified_base 11: mod_base = OTHER; note = 2'-deoxy-2'-fluoroadenosine-3'-phosphate
  modified_base 12: mod_base = OTHER; note = 2'-O-methyladenosine-3'-phosphate
  modified_base 13: mod_base = OTHER; note = 2'-O-methyladenosine-3'-phosphate
  modified_base 14: mod_base = OTHER; note = 2'-O-methyladenosine-3'-phosphate
  modified_base 15: mod_base = OTHER; note = 2'-O-methyladenosine-3'-phosphate
  modified_base 16: mod_base = OTHER; note = 2'-O-methyluridine-3'-phosphate
  modified_base 17: mod_base = OTHER; note = 2'-O-methyluridine-3'-phosphate
  modified_base 18: mod_base = OTHER; note = 2'-O-methyladenosine-3'-phosphate
  modified_base 19: mod_base = OTHER; note = 2'-O-methylcytidine-3'-phosphate
  modified_base 20: mod_base = OTHER; note = 2'-O-methyluridine-3'-phosphate
  modified_base 21: mod_base = OTHER; note = 2'-O-methyladenosine
gggtctggaaaaaaattacta

SEQ ID NO: 3938 - RNA, 21 nt, synthetic construct
  source 1..21: mol_type = other RNA
  modified_base 1: mod_base = OTHER; note = 2'-O-methylguanosine-3'-phosphate
  modified_base 2: mod_base = OTHER; note = 2'-O-methylguanosine-3'-phosphate
  modified_base 3: mod_base = OTHER; note = 2'-O-methyluridine-3'-phosphate
  modified_base 4: mod_base = OTHER; note = 2'-O-methylcytidine-3'-phosphate
  modified_base 5: mod_base = OTHER; note = 2'-O-methyluridine-3'-phosphate
  modified_base 6: mod_base = OTHER; note = 2'-O-methylguanosine-3'-phosphate
  modified_base 7: mod_base = OTHER; note = 2'-deoxy-2'-fluoroguanosine-3'-phosphate
  modified_base 8: mod_base = OTHER; note = 2'-O-methyladenosine-3'-phosphate
  modified_base 9: mod_base = OTHER; note = 2'-deoxy-2'-fluoroadenosine-3'-phosphate
  modified_base 10: mod_base = OTHER; note = 2'-deoxy-2'-fluoroadenosine-3'-phosphate
  modified_base 11: mod_base = OTHER; note = 2'-deoxy-2'-fluoroadenosine-3'-phosphate
  modified_base 12: mod_base = OTHER; note = 2'-O-methyladenosine-3'-phosphate
  modified_base 13: mod_base = OTHER; note = 2'-O-methyladenosine-3'-phosphate
  modified_base 14: mod_base = OTHER; note = 2'-O-methyladenosine-3'-phosphate
  modified_base 15: mod_base = OTHER; note = 2'-O-methyluridine-3'-phosphate
  modified_base 16: mod_base = OTHER; note = 2'-O-methyluridine-3'-phosphate
  modified_base 17: mod_base = OTHER; note = 2'-O-methyladenosine-3'-phosphate
  modified_base 18: mod_base = OTHER; note = 2'-O-methylcytidine-3'-phosphate
  modified_base 19: mod_base = OTHER; note = 2'-O-methyluridine-3'-phosphate
  modified_base 20: mod_base = OTHER; note = 2'-O-methylguanosine-3'-phosphate
  modified_base 21: mod_base = OTHER; note = 2'-O-methyladenosine
ggtctggaaaaaaattactga

SEQ ID NO: 3939 - RNA, 21 nt, synthetic construct
  source 1..21: mol_type = other RNA
  modified_base 1: mod_base = OTHER; note = 2'-O-methylguanosine-3'-phosphate
  modified_base 2: mod_base = OTHER; note = 2'-O-methyluridine-3'-phosphate
  modified_base 3: mod_base = OTHER; note = 2'-O-methylcytidine-3'-phosphate
  modified_base 4: mod_base = OTHER; note = 2'-O-methyluridine-3'-phosphate
  modified_base 5: mod_base = OTHER; note = 2'-O-methylguanosine-3'-phosphate
  modified_base 6: mod_base = OTHER; note = 2'-O-methylguanosine-3'-phosphate
  modified_base 7: mod_base = OTHER; note = 2'-deoxy-2'-fluoroadenosine-3'-phosphate
  modified_base 8: mod_base = OTHER; note = 2'-O-methyladenosine-3'-phosphate
  modified_base 9: mod_base = OTHER; note = 2'-deoxy-2'-fluoroadenosine-3'-phosphate
  modified_base 10: mod_base = OTHER; note = 2'-deoxy-2'-fluoroadenosine-3'-phosphate
  modified_base 11: mod_base = OTHER; note = 2'-deoxy-2'-fluoroadenosine-3'-phosphate
  modified_base 12: mod_base = OTHER; note = 2'-O-methyladenosine-3'-phosphate
  modified_base 13: mod_base = OTHER; note = 2'-O-methyladenosine-3'-phosphate
  modified_base 14: mod_base = OTHER; note = 2'-O-methyluridine-3'-phosphate
  modified_base 15: mod_base = OTHER; note = 2'-O-methyluridine-3'-phosphate
  modified_base 16: mod_base = OTHER; note = 2'-O-methyladenosine-3'-phosphate
  modified_base 17: mod_base = OTHER; note = 2'-O-methylcytidine-3'-phosphate
  modified_base 18: mod_base = OTHER; note = 2'-O-methyluridine-3'-phosphate
  modified_base 19: mod_base = OTHER; note = 2'-O-methylguanosine-3'-phosphate
  modified_base 20: mod_base = OTHER; note = 2'-O-methylcytidine-3'-phosphate
  modified_base 21: mod_base = OTHER; note = 2'-O-methyladenosine
gtctggaaaaaaattactgca

SEQ ID NO: 3940 - RNA, 21 nt, synthetic construct
  source 1..21: mol_type = other RNA
  modified_base 1: mod_base = OTHER; note = 2'-O-methyluridine-3'-phosphate
  modified_base 2: mod_base = OTHER; note = 2'-O-methylcytidine-3'-phosphate
  modified_base 3: mod_base = OTHER; note = 2'-O-methyluridine-3'-phosphate
  modified_base 4: mod_base = OTHER; note = 2'-O-methylguanosine-3'-phosphate
  modified_base 5: mod_base = OTHER; note = 2'-O-methylguanosine-3'-phosphate
  modified_base 6: mod_base = OTHER; note = 2'-O-methyladenosine-3'-phosphate
  modified_base 7: mod_base = OTHER; note = 2'-deoxy-2'-fluoroadenosine-3'-phosphate
  modified_base 8: mod_base = OTHER; note = 2'-O-methyladenosine-3'-phosphate
  modified_base 9: mod_base = OTHER; note = 2'-deoxy-2'-fluoroadenosine-3'-phosphate
  modified_base 10: mod_base = OTHER; note = 2'-deoxy-2'-fluoroadenosine-3'-phosphate
  modified_base 11: mod_base = OTHER; note = 2'-deoxy-2'-fluoroadenosine-3'-phosphate
  modified_base 12: mod_base = OTHER; note = 2'-O-methyladenosine-3'-phosphate
  modified_base 13: mod_base = OTHER; note = 2'-O-methyluridine-3'-phosphate
  modified_base 14: mod_base = OTHER; note = 2'-O-methyluridine-3'-phosphate
  modified_base 15: mod_base = OTHER; note = 2'-O-methyladenosine-3'-phosphate
  modified_base 16: mod_base = OTHER; note = 2'-O-methylcytidine-3'-phosphate
  modified_base 17: mod_base = OTHER; note = 2'-O-methyluridine-3'-phosphate
  modified_base 18: mod_base = OTHER; note = 2'-O-methylguanosine-3'-phosphate
  modified_base 19: mod_base = OTHER; note = 2'-O-methylcytidine-3'-phosphate
  modified_base 20: mod_base = OTHER; note = 2'-O-methylcytidine-3'-phosphate
  modified_base 21: mod_base = OTHER; note = 2'-O-methyladenosine
tctggaaaaaaattactgcca

SEQ ID NO: 3941 - RNA, 21 nt, synthetic construct
  source 1..21: mol_type = other RNA
  modified_base 1: mod_base = OTHER; note = 2'-O-methylcytidine-3'-phosphate
  modified_base 2: mod_base = OTHER; note = 2'-O-methyluridine-3'-phosphate
  modified_base 3: mod_base = OTHER; note = 2'-O-methylguanosine-3'-phosphate
  modified_base 4: mod_base = OTHER; note = 2'-O-methylguanosine-3'-phosphate
  modified_base 5: mod_base = OTHER; note = 2'-O-methyladenosine-3'-phosphate
  modified_base 6: mod_base = OTHER; note = 2'-O-methyladenosine-3'-phosphate
  modified_base 7: mod_base = OTHER; note = 2'-deoxy-2'-fluoroadenosine-3'-phosphate
  modified_base 8: mod_base = OTHER; note = 2'-O-methyladenosine-3'-phosphate
  modified_base 9: mod_base = OTHER; note = 2'-deoxy-2'-fluoroadenosine-3'-phosphate
  modified_base 10: mod_base = OTHER; note = 2'-deoxy-2'-fluoroadenosine-3'-phosphate
  modified_base 11: mod_base = OTHER; note = 2'-deoxy-2'-fluoroadenosine-3'-phosphate
  modified_base 12: mod_base = OTHER; note = 2'-O-methyluridine-3'-phosphate
  modified_base 13: mod_base = OTHER; note = 2'-O-methyluridine-3'-phosphate
  modified_base 14: mod_base = OTHER; note = 2'-O-methyladenosine-3'-phosphate
  modified_base 15: mod_base = OTHER; note = 2'-O-methylcytidine-3'-phosphate
  modified_base 16: mod_base = OTHER; note = 2'-O-methyluridine-3'-phosphate
  modified_base 17: mod_base = OTHER; note = 2'-O-methylguanosine-3'-phosphate
  modified_base 18: mod_base = OTHER; note = 2'-O-methylcytidine-3'-phosphate
  modified_base 19: mod_base = OTHER; note = 2'-O-methylcytidine-3'-phosphate
  modified_base 20: mod_base = OTHER; note = 2'-O-methylguanosine-3'-phosphate
  modified_base 21: mod_base = OTHER; note = 2'-O-methyladenosine
ctggaaaaaaattactgccga

SEQ ID NO: 3942 - RNA, 21 nt, synthetic construct
  source 1..21: mol_type = other RNA
  modified_base 1: mod_base = OTHER; note = 2'-O-methyluridine-3'-phosphate
  modified_base 2: mod_base = OTHER; note = 2'-O-methylguanosine-3'-phosphate
  modified_base 3: mod_base = OTHER; note = 2'-O-methylguanosine-3'-phosphate
  modified_base 4: mod_base = OTHER; note = 2'-O-methyladenosine-3'-phosphate
  modified_base 5: mod_base = OTHER; note = 2'-O-methyladenosine-3'-phosphate
  modified_base 6: mod_base = OTHER; note = 2'-O-methyladenosine-3'-phosphate
  modified_base 7: mod_base = OTHER; note = 2'-deoxy-2'-fluoroadenosine-3'-phosphate
  modified_base 8: mod_base = OTHER; note = 2'-O-methyladenosine-3'-phosphate
  modified_base 9: mod_base = OTHER; note = 2'-deoxy-2'-fluoroadenosine-3'-phosphate
  modified_base 10: mod_base = OTHER; note = 2'-deoxy-2'-fluoroadenosine-3'-phosphate
  modified_base 11: mod_base = OTHER; note = 2'-deoxy-2'-fluorouridine-3'-phosphate
  modified_base 12: mod_base = OTHER; note = 2'-O-methyluridine-3'-phosphate
  modified_base 13: mod_base = OTHER; note = 2'-O-methyladenosine-3'-phosphate
  modified_base 14: mod_base = OTHER; note = 2'-O-methylcytidine-3'-phosphate
  modified_base 15: mod_base = OTHER; note = 2'-O-methyluridine-3'-phosphate
  modified_base 16: mod_base = OTHER; note = 2'-O-methylguanosine-3'-phosphate
  modified_base 17: mod_base = OTHER; note = 2'-O-methylcytidine-3'-phosphate
  modified_base 18: mod_base = OTHER; note = 2'-O-methylcytidine-3'-phosphate
  modified_base 19: mod_base = OTHER; note = 2'-O-methylguanosine-3'-phosphate
  modified_base 20: mod_base = OTHER; note = 2'-O-methyluridine-3'-phosphate
  modified_base 21: mod_base = OTHER; note = 2'-O-methyladenosine
tggaaaaaaattactgccgta

SEQ ID NO: 3943 - RNA, 21 nt, synthetic construct
  source 1..21: mol_type = other RNA
  modified_base 1: mod_base = OTHER; note = 2'-O-methylcytidine-3'-phosphate
  modified_base 2: mod_base = OTHER; note = 2'-O-methylguanosine-3'-phosphate
  modified_base 3: mod_base = OTHER; note = 2'-O-methyluridine-3'-phosphate
  modified_base 4: mod_base = OTHER; note = 2'-O-methyladenosine-3'-phosphate
  modified_base 5: mod_base = OTHER; note = 2'-O-methyladenosine-3'-phosphate
  modified_base 6: mod_base = OTHER; note = 2'-O-methylcytidine-3'-phosphate
  modified_base 7: mod_base = OTHER; note = 2'-deoxy-2'-fluorocytidine-3'-phosphate
  modified_base 8: mod_base = OTHER; note = 2'-O-methylcytidine-3'-phosphate
  modified_base 9: mod_base = OTHER; note = 2'-deoxy-2'-fluorouridine-3'-phosphate
  modified_base 10: mod_base = OTHER; note = 2'-deoxy-2'-fluoroguanosine-3'-phosphate
  modified_base 11: mod_base = OTHER; note = 2'-deoxy-2'-fluoroadenosine-3'-phosphate
  modified_base 12: mod_base = OTHER; note = 2'-O-methyluridine-3'-phosphate
  modified_base 13: mod_base = OTHER; note = 2'-O-methylguanosine-3'-phosphate
  modified_base 14: mod_base = OTHER; note = 2'-O-methylguanosine-3'-phosphate
  modified_base 15: mod_base = OTHER; note = 2'-O-methyluridine-3'-phosphate
  modified_base 16: mod_base = OTHER; note = 2'-O-methylguanosine-3'-phosphate
  modified_base 17: mod_base = OTHER; note = 2'-O-methyladenosine-3'-phosphate
  modified_base 18: mod_base = OTHER; note = 2'-O-methyluridine-3'-phosphate
  modified_base 19: mod_base = OTHER; note = 2'-O-methylguanosine-3'-phosphate
  modified_base 20: mod_base = OTHER; note = 2'-O-methyluridine-3'-phosphate
  modified_base 21: mod_base = OTHER; note = 2'-O-methyladenosine
cgtaaccctgatggtgatgta

SEQ ID NO: 3944 - RNA, 21 nt, synthetic construct
  source 1..21: mol_type = other RNA
  modified_base 1: mod_base = OTHER; note = 2'-O-methyladenosine-3'-phosphate
  modified_base 2: mod_base = OTHER; note = 2'-O-methyladenosine-3'-phosphate
  modified_base 3: mod_base = OTHER; note = 2'-O-methylcytidine-3'-phosphate
  modified_base 4: mod_base = OTHER; note = 2'-O-methylcytidine-3'-phosphate
  modified_base 5: mod_base = OTHER; note = 2'-O-methylcytidine-3'-phosphate
  modified_base 6: mod_base = OTHER; note = 2'-O-methyluridine-3'-phosphate
  modified_base 7: mod_base = OTHER; note = 2'-deoxy-2'-fluoroguanosine-3'-phosphate
  modified_base 8: mod_base = OTHER; note = 2'-O-methyladenosine-3'-phosphate
  modified_base 9: mod_base = OTHER; note = 2'-deoxy-2'-fluorouridine-3'-phosphate
  modified_base 10: mod_base = OTHER; note = 2'-deoxy-2'-fluoroguanosine-3'-phosphate
  modified_base 11: mod_base = OTHER; note = 2'-deoxy-2'-fluoroguanosine-3'-phosphate
  modified_base 12: mod_base = OTHER; note = 2'-O-methyluridine-3'-phosphate
  modified_base 13: mod_base = OTHER; note = 2'-O-methylguanosine-3'-phosphate
  modified_base 14: mod_base = OTHER; note = 2'-O-methyladenosine-3'-phosphate
  modified_base 15: mod_base = OTHER; note = 2'-O-methyluridine-3'-phosphate
  modified_base 16: mod_base = OTHER; note = 2'-O-methylguanosine-3'-phosphate
  modified_base 17: mod_base = OTHER; note = 2'-O-methyluridine-3'-phosphate
  modified_base 18: mod_base = OTHER; note = 2'-O-methyladenosine-3'-phosphate
  modified_base 19: mod_base = OTHER; note = 2'-O-methylguanosine-3'-phosphate
  modified_base 20: mod_base = OTHER; note = 2'-O-methylguanosine-3'-phosphate
  modified_base 21: mod_base = OTHER; note = 2'-O-methyladenosine
aaccctgatggtgatgtagga

SEQ ID NO: 3945 - RNA, 21 nt, synthetic construct
  source 1..21: mol_type = other RNA
  modified_base 1: mod_base = OTHER; note = 2'-O-methylcytidine-3'-phosphate
  modified_base 2: mod_base = OTHER; note = 2'-O-methylcytidine-3'-phosphate
  modified_base 3: mod_base = OTHER; note = 2'-O-methylcytidine-3'-phosphate
  modified_base 4: mod_base = OTHER; note = 2'-O-methyluridine-3'-phosphate
  modified_base 5: mod_base = OTHER; note = 2'-O-methylguanosine-3'-phosphate
  modified_base 6: mod_base = OTHER; note = 2'-O-methyladenosine-3'-phosphate
  modified_base 7: mod_base = OTHER; note = 2'-deoxy-2'-fluorouridine-3'-phosphate
  modified_base 8: mod_base = OTHER; note = 2'-O-methylguanosine-3'-phosphate
  modified_base 9: mod_base = OTHER; note = 2'-deoxy-2'-fluoroguanosine-3'-phosphate
  modified_base 10: mod_base = OTHER; note = 2'-deoxy-2'-fluorouridine-3'-phosphate
  modified_base 11: mod_base = OTHER; note = 2'-deoxy-2'-fluoroguanosine-3'-phosphate
  modified_base 12: mod_base = OTHER; note = 2'-O-methyladenosine-3'-phosphate
  modified_base 13: mod_base = OTHER; note = 2'-O-methyluridine-3'-phosphate
  modified_base 14: mod_base = OTHER; note = 2'-O-methylguanosine-3'-phosphate
  modified_base 15: mod_base = OTHER; note = 2'-O-methyluridine-3'-phosphate
  modified_base 16: mod_base = OTHER; note = 2'-O-methyladenosine-3'-phosphate
  modified_base 17: mod_base = OTHER; note = 2'-O-methylguanosine-3'-phosphate
  modified_base 18: mod_base = OTHER; note = 2'-O-methylguanosine-3'-phosphate
  modified_base 19: mod_base = OTHER; note = 2'-O-methyluridine-3'-phosphate
  modified_base 20: mod_base = OTHER; note = 2'-O-methylguanosine-3'-phosphate
  modified_base 21: mod_base = OTHER; note = 2'-O-methyladenosine
ccctgatggtgatgtaggtga

SEQ ID NO: 3946 - RNA, 21 nt, synthetic construct
  source 1..21: mol_type = other RNA
  modified_base 1: mod_base = OTHER; note = 2'-O-methylcytidine-3'-phosphate
  modified_base 2: mod_base = OTHER; note = 2'-O-methylcytidine-3'-phosphate
  modified_base 3: mod_base = OTHER; note = 2'-O-methyluridine-3'-phosphate
  modified_base 4: mod_base = OTHER; note = 2'-O-methylguanosine-3'-phosphate
  modified_base 5: mod_base = OTHER; note = 2'-O-methyladenosine-3'-phosphate
  modified_base 6: mod_base = OTHER; note = 2'-O-methyluridine-3'-phosphate
  modified_base 7: mod_base = OTHER; note = 2'-deoxy-2'-fluoroguanosine-3'-phosphate
  modified_base 8: mod_base = OTHER; note = 2'-O-methylguanosine-3'-phosphate
  modified_base 9: mod_base = OTHER; note = 2'-deoxy-2'-fluorouridine-3'-phosphate
  modified_base 10: mod_base = OTHER; note = 2'-deoxy-2'-fluoroguanosine-3'-phosphate
  modified_base 11: mod_base = OTHER; note = 2'-deoxy-2'-fluoroadenosine-3'-phosphate
  modified_base 12: mod_base = OTHER; note = 2'-O-methyluridine-3'-phosphate
  modified_base 13: mod_base = OTHER; note = 2'-O-methylguanosine-3'-phosphate
  modified_base 14: mod_base = OTHER; note = 2'-O-methyluridine-3'-phosphate
  modified_base 15: mod_base = OTHER; note = 2'-O-methyladenosine-3'-phosphate
  modified_base 16: mod_base = OTHER; note = 2'-O-methylguanosine-3'-phosphate
  modified_base 17: mod_base = OTHER; note = 2'-O-methylguanosine-3'-phosphate
  modified_base 18: mod_base = OTHER; note = 2'-O-methyluridine-3'-phosphate
  modified_base 19: mod_base = OTHER; note = 2'-O-methylguanosine-3'-phosphate
  modified_base 20: mod_base = OTHER; note = 2'-O-methylguanosine-3'-phosphate
  modified_base 21: mod_base = OTHER; note = 2'-O-methyladenosine
cctgatggtgatgtaggtgga

SEQ ID NO: 3947 - RNA, 21 nt, synthetic construct
  source 1..21: mol_type = other RNA
  modified_base 1: mod_base = OTHER; note = 2'-O-methyluridine-3'-phosphate
  modified_base 2: mod_base = OTHER; note = 2'-O-methyladenosine-3'-phosphate
  modified_base 3: mod_base = OTHER; note = 2'-O-methylguanosine-3'-phosphate
  modified_base 4: mod_base = OTHER; note = 2'-O-methylguanosine-3'-phosphate
  modified_base 5: mod_base = OTHER; note = 2'-O-methyluridine-3'-phosphate
  modified_base 6: mod_base = OTHER; note = 2'-O-methylguanosine-3'-phosphate
  modified_base 7: mod_base = OTHER; note = 2'-deoxy-2'-fluoroguanosine-3'-phosphate
  modified_base 8: mod_base = OTHER; note = 2'-O-methyluridine-3'-phosphate
  modified_base 9: mod_base = OTHER; note = 2'-deoxy-2'-fluorocytidine-3'-phosphate
  modified_base 10: mod_base = OTHER; note = 2'-deoxy-2'-fluorocytidine-3'-phosphate
  modified_base 11: mod_base = OTHER; note = 2'-deoxy-2'-fluorocytidine-3'-phosphate
  modified_base 12: mod_base = OTHER; note = 2'-O-methyluridine-3'-phosphate
  modified_base 13: mod_base = OTHER; note = 2'-O-methylguanosine-3'-phosphate
  modified_base 14: mod_base = OTHER; note = 2'-O-methylguanosine-3'-phosphate
  modified_base 15: mod_base = OTHER; note = 2'-O-methyluridine-3'-phosphate
  modified_base 16: mod_base = OTHER; note = 2'-O-methylguanosine-3'-phosphate
  modified_base 17: mod_base = OTHER; note = 2'-O-methylcytidine-3'-phosphate
  modified_base 18: mod_base = OTHER; note = 2'-O-methyluridine-3'-phosphate
  modified_base 19: mod_base = OTHER; note = 2'-O-methyladenosine-3'-phosphate
  modified_base 20: mod_base = OTHER; note = 2'-O-methylcytidine-3'-phosphate
  modified_base 21: mod_base = OTHER; note = 2'-O-methyladenosine
taggtggtccctggtgctaca

SEQ ID NO: 3948 - RNA, 21 nt, synthetic construct
  source 1..21: mol_type = other RNA
  modified_base 1: mod_base = OTHER; note = 2'-O-methyladenosine-3'-phosphate
  modified_base 2: mod_base = OTHER; note = 2'-O-methylguanosine-3'-phosphate
  modified_base 3: mod_base = OTHER; note = 2'-O-methylguanosine-3'-phosphate
  modified_base 4: mod_base = OTHER; note = 2'-O-methyluridine-3'-phosphate
  modified_base 5: mod_base = OTHER; note = 2'-O-methylguanosine-3'-phosphate
  modified_base 6: mod_base = OTHER; note = 2'-O-methylguanosine-3'-phosphate
  modified_base 7: mod_base = OTHER; note = 2'-deoxy-2'-fluorouridine-3'-phosphate
  modified_base 8: mod_base = OTHER; note = 2'-O-methylcytidine-3'-phosphate
  modified_base 9: mod_base = OTHER; note = 2'-deoxy-2'-fluorocytidine-3'-phosphate
  modified_base 10: mod_base = OTHER; note = 2'-deoxy-2'-fluorocytidine-3'-phosphate
  modified_base 11: mod_base = OTHER; note = 2'-deoxy-2'-fluorouridine-3'-phosphate
  modified_base 12: mod_base = OTHER; note = 2'-O-methylguanosine-3'-phosphate
  modified_base 13: mod_base = OTHER; note = 2'-O-methylguanosine-3'-phosphate
  modified_base 14: mod_base = OTHER; note = 2'-O-methyluridine-3'-phosphate
  modified_base 15: mod_base = OTHER; note = 2'-O-methylguanosine-3'-phosphate
  modified_base 16: mod_base = OTHER; note = 2'-O-methylcytidine-3'-phosphate
  modified_base 17: mod_base = OTHER; note = 2'-O-methyluridine-3'-phosphate
  modified_base 18: mod_base = OTHER; note = 2'-O-methyladenosine-3'-phosphate
  modified_base 19: mod_base = OTHER; note = 2'-O-methylcytidine-3'-phosphate
  modified_base 20: mod_base = OTHER; note = 2'-O-methyladenosine-3'-phosphate
  modified_base 21: mod_base = OTHER; note = 2'-O-methyladenosine
aggtggtccctggtgctacaa

SEQ ID NO: 3949 - RNA, 21 nt, synthetic construct
  source 1..21: mol_type = other RNA
  modified_base 1: mod_base = OTHER; note = 2'-O-methylguanosine-3'-phosphate
  modified_base 2: mod_base = OTHER; note = 2'-O-methyluridine-3'-phosphate
  modified_base 3: mod_base = OTHER; note = 2'-O-methylguanosine-3'-phosphate
  modified_base 4: mod_base = OTHER; note = 2'-O-methylguanosine-3'-phosphate
  modified_base 5: mod_base = OTHER; note = 2'-O-methyluridine-3'-phosphate
  modified_base 6: mod_base = OTHER; note = 2'-O-methylcytidine-3'-phosphate
  modified_base 7: mod_base = OTHER; note = 2'-deoxy-2'-fluorocytidine-3'-phosphate
  modified_base 8: mod_base = OTHER; note = 2'-O-methylcytidine-3'-phosphate
  modified_base 9: mod_base = OTHER; note = 2'-deoxy-2'-fluorouridine-3'-phosphate
  modified_base 10: mod_base = OTHER; note = 2'-deoxy-2'-fluoroguanosine-3'-phosphate
  modified_base 11: mod_base = OTHER; note = 2'-deoxy-2'-fluoroguanosine-3'-phosphate
  modified_base 12: mod_base = OTHER; note = 2'-O-methyluridine-3'-phosphate
  modified_base 13: mod_base = OTHER; note = 2'-O-methylguanosine-3'-phosphate
  modified_base 14: mod_base = OTHER; note = 2'-O-methylcytidine-3'-phosphate
  modified_base 15: mod_base = OTHER; note = 2'-O-methyluridine-3'-phosphate
  modified_base 16: mod_base = OTHER; note = 2'-O-methyladenosine-3'-phosphate
  modified_base 17: mod_base = OTHER; note = 2'-O-methylcytidine-3'-phosphate
  modified_base 18: mod_base = OTHER; note = 2'-O-methyladenosine-3'-phosphate
  modified_base 19: mod_base = OTHER; note = 2'-O-methylcytidine-3'-phosphate
  modified_base 20: mod_base = OTHER; note = 2'-O-methylguanosine-3'-phosphate
  modified_base 21: mod_base = OTHER; note = 2'-O-methyladenosine
gtggtccctggtgctacacga

SEQ ID NO: 3950 - RNA, 21 nt, synthetic construct
  source 1..21: mol_type = other RNA
  modified_base 1: mod_base = OTHER; note = 2'-O-methylcytidine-3'-phosphate
  modified_base 2: mod_base = OTHER; note = 2'-O-methyluridine-3'-phosphate
  modified_base 3: mod_base = OTHER; note = 2'-O-methylguanosine-3'-phosphate
  modified_base 4: mod_base = OTHER; note = 2'-O-methylguanosine-3'-phosphate
  modified_base 5: mod_base = OTHER; note = 2'-O-methyluridine-3'-phosphate
  modified_base 6: mod_base = OTHER; note = 2'-O-methylguanosine-3'-phosphate
  modified_base 7: mod_base = OTHER; note = 2'-deoxy-2'-fluorocytidine-3'-phosphate
  modified_base 8: mod_base = OTHER; note = 2'-O-methyluridine-3'-phosphate
  modified_base 9: mod_base = OTHER; note = 2'-deoxy-2'-fluoroadenosine-3'-phosphate
  modified_base 10: mod_base = OTHER; note = 2'-deoxy-2'-fluorocytidine-3'-phosphate
  modified_base 11: mod_base = OTHER; note = 2'-deoxy-2'-fluoroadenosine-3'-phosphate
  modified_base 12: mod_base = OTHER; note = 2'-O-methylcytidine-3'-phosphate
  modified_base 13: mod_base = OTHER; note = 2'-O-methylguanosine-3'-phosphate
  modified_base 14: mod_base = OTHER; note = 2'-O-methyladenosine-3'-phosphate
  modified_base 15: mod_base = OTHER; note = 2'-O-methylcytidine-3'-phosphate
  modified_base 16: mod_base = OTHER; note = 2'-O-methyladenosine-3'-phosphate
  modified_base 17: mod_base = OTHER; note = 2'-O-methyladenosine-3'-phosphate
  modified_base 18: mod_base = OTHER; note = 2'-O-methyladenosine-3'-phosphate
  modified_base 19: mod_base = OTHER; note = 2'-O-methyluridine-3'-phosphate
  modified_base 20: mod_base = OTHER; note = 2'-O-methylcytidine-3'-phosphate
  modified_base 21: mod_base = OTHER; note = 2'-O-methyladenosine
ctggtgctacacgacaaatca

SEQ ID NO: 3951 - RNA, 21 nt, synthetic construct
  source 1..21: mol_type = other RNA
  modified_base 1: mod_base = OTHER; note = 2'-O-methylguanosine-3'-phosphate
  modified_base 2: mod_base = OTHER; note = 2'-O-methylguanosine-3'-phosphate
  modified_base 3: mod_base = OTHER; note = 2'-O-methyluridine-3'-phosphate
  modified_base 4: mod_base = OTHER; note = 2'-O-methylguanosine-3'-phosphate
  modified_base 5: mod_base = OTHER; note = 2'-O-methylcytidine-3'-phosphate
  modified_base 6: mod_base = OTHER; note = 2'-O-methyluridine-3'-phosphate
  modified_base 7: mod_base = OTHER; note = 2'-deoxy-2'-fluoroadenosine-3'-phosphate
  modified_base 8: mod_base = OTHER; note = 2'-O-methylcytidine-3'-phosphate
  modified_base 9: mod_base = OTHER; note = 2'-deoxy-2'-fluoroadenosine-3'-phosphate
  modified_base 10: mod_base = OTHER; note = 2'-deoxy-2'-fluorocytidine-3'-phosphate
  modified_base 11: mod_base = OTHER; note = 2'-deoxy-2'-fluoroguanosine-3'-phosphate
  modified_base 12: mod_base = OTHER; note = 2'-O-methyladenosine-3'-phosphate
  modified_base 13: mod_base = OTHER; note = 2'-O-methylcytidine-3'-phosphate
  modified_base 14: mod_base = OTHER; note = 2'-O-methyladenosine-3'-phosphate
  modified_base 15: mod_base = OTHER; note = 2'-O-methyladenosine-3'-phosphate
  modified_base 16: mod_base = OTHER; note = 2'-O-methyladenosine-3'-phosphate
  modified_base 17: mod_base = OTHER; note = 2'-O-methyluridine-3'-phosphate
  modified_base 18: mod_base = OTHER; note = 2'-O-methylcytidine-3'-phosphate
  modified_base 19: mod_base = OTHER; note = 2'-O-methylcytidine-3'-phosphate
  modified_base 20: mod_base = OTHER; note = 2'-O-methyladenosine-3'-phosphate
  modified_base 21: mod_base = OTHER; note = 2'-O-methyladenosine
ggtgctacacgacaaatccaa

SEQ ID NO: 3952 - RNA, 21 nt, synthetic construct
  source 1..21: mol_type = other RNA
  modified_base 1: mod_base = OTHER; note = 2'-O-methylguanosine-3'-phosphate
  modified_base 2: mod_base = OTHER; note = 2'-O-methyluridine-3'-phosphate
  modified_base 3: mod_base = OTHER; note = 2'-O-methylguanosine-3'-phosphate
  modified_base 4: mod_base = OTHER; note = 2'-O-methylcytidine-3'-phosphate
  modified_base 5: mod_base = OTHER; note = 2'-O-methyluridine-3'-phosphate
  modified_base 6: mod_base = OTHER; note = 2'-O-methyladenosine-3'-phosphate
  modified_base 7: mod_base = OTHER; note = 2'-deoxy-2'-fluorocytidine-3'-phosphate
  modified_base 8: mod_base = OTHER; note = 2'-O-methyladenosine-3'-phosphate
  modified_base 9: mod_base = OTHER; note = 2'-deoxy-2'-fluorocytidine-3'-phosphate
  modified_base 10: mod_base = OTHER; note = 2'-deoxy-2'-fluoroguanosine-3'-phosphate
  modified_base 11: mod_base = OTHER; note = 2'-deoxy-2'-fluoroadenosine-3'-phosphate
  modified_base 12: mod_base = OTHER; note = 2'-O-methylcytidine-3'-phosphate
  modified_base 13: mod_base = OTHER; note = 2'-O-methyladenosine-3'-phosphate
  modified_base 14: mod_base = OTHER; note = 2'-O-methyladenosine-3'-phosphate
  modified_base 15: mod_base = OTHER; note = 2'-O-methyladenosine-3'-phosphate
  modified_base 16: mod_base = OTHER; note = 2'-O-methyluridine-3'-phosphate
  modified_base 17: mod_base = OTHER; note = 2'-O-methylcytidine-3'-phosphate
  modified_base 18: mod_base = OTHER; note = 2'-O-methylcytidine-3'-phosphate
  modified_base 19: mod_base = OTHER; note = 2'-O-methyladenosine-3'-phosphate
  modified_base 20: mod_base = OTHER; note = 2'-O-methyladenosine-3'-phosphate
  modified_base 21: mod_base = OTHER; note = 2'-O-methyladenosine
gtgctacacgacaaatccaaa

SEQ ID NO: 3953 - RNA, 21 nt, synthetic construct
  source 1..21: mol_type = other RNA
  modified_base 1: mod_base = OTHER; note = 2'-O-methyluridine-3'-phosphate
  modified_base 2: mod_base = OTHER; note = 2'-O-methylguanosine-3'-phosphate
  modified_base 3: mod_base = OTHER; note = 2'-O-methylcytidine-3'-phosphate
  modified_base 4: mod_base = OTHER; note = 2'-O-methyluridine-3'-phosphate
  modified_base 5: mod_base = OTHER; note = 2'-O-methyladenosine-3'-phosphate
  modified_base 6: mod_base = OTHER; note = 2'-O-methylcytidine-3'-phosphate
  modified_base 7: mod_base = OTHER; note = 2'-deoxy-2'-fluoroadenosine-3'-phosphate
  modified_base 8: mod_base = OTHER; note = 2'-O-methylcytidine-3'-phosphate
  modified_base 9: mod_base = OTHER; note = 2'-deoxy-2'-fluoroguanosine-3'-phosphate
  modified_base 10: mod_base = OTHER; note = 2'-deoxy-2'-fluoroadenosine-3'-phosphate
  modified_base 11: mod_base = OTHER; note = 2'-deoxy-2'-fluorocytidine-3'-phosphate
  modified_base 12: mod_base = OTHER; note = 2'-O-methyladenosine-3'-phosphate
  modified_base 13: mod_base = OTHER; note = 2'-O-methyladenosine-3'-phosphate
  modified_base 14: mod_base = OTHER; note = 2'-O-methyladenosine-3'-phosphate
  modified_base 15: mod_base = OTHER; note = 2'-O-methyluridine-3'-phosphate
  modified_base 16: mod_base = OTHER; note = 2'-O-methylcytidine-3'-phosphate
  modified_base 17: mod_base = OTHER; note = 2'-O-methylcytidine-3'-phosphate
  modified_base 18: mod_base = OTHER; note = 2'-O-methyladenosine-3'-phosphate
  modified_base 19: mod_base = OTHER; note = 2'-O-methyladenosine-3'-phosphate
  modified_base 20: mod_base = OTHER; note = 2'-O-methylguanosine-3'-phosphate
  modified_base 21: mod_base = OTHER; note = 2'-O-methyladenosine
tgctacacgacaaatccaaga

SEQ ID NO: 3954 - RNA, 21 nt, synthetic construct
  source 1..21: mol_type = other RNA
  modified_base 1: mod_base = OTHER; note = 2'-O-methylguanosine-3'-phosphate
  modified_base 2: mod_base = OTHER; note = 2'-O-methylcytidine-3'-phosphate
  modified_base 3: mod_base = OTHER; note = 2'-O-methyluridine-3'-phosphate
  modified_base 4: mod_base = OTHER; note = 2'-O-methyladenosine-3'-phosphate
  modified_base 5: mod_base = OTHER; note = 2'-O-methylcytidine-3'-phosphate
  modified_base 6: mod_base = OTHER; note = 2'-O-methyladenosine-3'-phosphate
  modified_base 7: mod_base = OTHER; note = 2'-deoxy-2'-fluorocytidine-3'-phosphate
  modified_base 8: mod_base = OTHER; note = 2'-O-methylguanosine-3'-phosphate
  modified_base 9: mod_base = OTHER; note = 2'-deoxy-2'-fluoroadenosine-3'-phosphate
  modified_base 10: mod_base = OTHER; note = 2'-deoxy-2'-fluorocytidine-3'-phosphate
  modified_base 11: mod_base = OTHER; note = 2'-deoxy-2'-fluoroadenosine-3'-phosphate
  modified_base 12: mod_base = OTHER; note = 2'-O-methyladenosine-3'-phosphate
  modified_base 13: mod_base = OTHER; note = 2'-O-methyladenosine-3'-phosphate
  modified_base 14: mod_base = OTHER; note = 2'-O-methyluridine-3'-phosphate
  modified_base 15: mod_base = OTHER; note = 2'-O-methylcytidine-3'-phosphate
  modified_base 16: mod_base = OTHER; note = 2'-O-methylcytidine-3'-phosphate
  modified_base 17: mod_base = OTHER; note = 2'-O-methyladenosine-3'-phosphate
  modified_base 18: mod_base = OTHER; note = 2'-O-methyladenosine-3'-phosphate
  modified_base 19: mod_base = OTHER; note = 2'-O-methylguanosine-3'-phosphate
  modified_base 20: mod_base = OTHER; note = 2'-O-methyladenosine-3'-phosphate
  modified_base 21: mod_base = OTHER; note = 2'-O-methyladenosine
gctacacgacaaatccaagaa

SEQ ID NO: 3955 - RNA, 21 nt, synthetic construct
  source 1..21: mol_type = other RNA
  modified_base 1: mod_base = OTHER; note = 2'-O-methylcytidine-3'-phosphate
  modified_base 2: mod_base = OTHER; note = 2'-O-methyluridine-3'-phosphate
  modified_base 3: mod_base = OTHER; note = 2'-O-methyladenosine-3'-phosphate
  modified_base 4: mod_base = OTHER; note = 2'-O-methylcytidine-3'-phosphate
  modified_base 5: mod_base = OTHER; note = 2'-O-methyladenosine-3'-phosphate
  modified_base 6: mod_base = OTHER; note = 2'-O-methylcytidine-3'-phosphate
  modified_base 7: mod_base = OTHER; note = 2'-deoxy-2'-fluoroguanosine-3'-phosphate
  modified_base 8: mod_base = OTHER; note = 2'-O-methyladenosine-3'-phosphate
  modified_base 9: mod_base = OTHER; note = 2'-deoxy-2'-fluorocytidine-3'-phosphate
  modified_base 10: mod_base = OTHER; note = 2'-deoxy-2'-fluoroadenosine-3'-phosphate
  modified_base 11: mod_base = OTHER; note = 2'-deoxy-2'-fluoroadenosine-3'-phosphate
  modified_base 12: mod_base = OTHER; note = 2'-O-methyladenosine-3'-phosphate
  modified_base 13: mod_base = OTHER; note = 2'-O-methyluridine-3'-phosphate
  modified_base 14: mod_base = OTHER; note = 2'-O-methylcytidine-3'-phosphate
  modified_base 15: mod_base = OTHER; note = 2'-O-methylcytidine-3'-phosphate
  modified_base 16: mod_base = OTHER; note = 2'-O-methyladenosine-3'-phosphate
  modified_base 17: mod_base = OTHER; note = 2'-O-methyladenosine-3'-phosphate
  modified_base 18: mod_base = OTHER; note = 2'-O-methylguanosine-3'-phosphate
  modified_base 19: mod_base = OTHER; note = 2'-O-methyladenosine-3'-phosphate
  modified_base 20: mod_base = OTHER; note = 2'-O-methyladenosine-3'-phosphate
  modified_base 21: mod_base = OTHER; note = 2'-O-methyladenosine
ctacacgacaaatccaagaaa

SEQ ID NO: 3956 - RNA, 21 nt, synthetic construct
  source 1..21: mol_type = other RNA
  modified_base 1: mod_base = OTHER; note = 2'-O-methyluridine-3'-phosphate
  modified_base 2: mod_base = OTHER; note = 2'-O-methyladenosine-3'-phosphate
  modified_base 3: mod_base = OTHER; note = 2'-O-methylcytidine-3'-phosphate
  modified_base 4: mod_base = OTHER; note = 2'-O-methyladenosine-3'-phosphate
  modified_base 5: mod_base = OTHER; note = 2'-O-methylcytidine-3'-phosphate
  modified_base 6: mod_base = OTHER; note = 2'-O-methylguanosine-3'-phosphate
  modified_base 7: mod_base = OTHER; note = 2'-deoxy-2'-fluoroadenosine-3'-phosphate
  modified_base 8: mod_base = OTHER; note = 2'-O-methylcytidine-3'-phosphate
  modified_base 9: mod_base = OTHER; note = 2'-deoxy-2'-fluoroadenosine-3'-phosphate
  modified_base 10: mod_base = OTHER; note = 2'-deoxy-2'-fluoroadenosine-3'-phosphate
  modified_base 11: mod_base = OTHER; note = 2'-deoxy-2'-fluoroadenosine-3'-phosphate
  modified_base 12: mod_base = OTHER; note = 2'-O-methyluridine-3'-phosphate
  modified_base 13: mod_base = OTHER; note = 2'-O-methylcytidine-3'-phosphate
  modified_base 14: mod_base = OTHER; note = 2'-O-methylcytidine-3'-phosphate
  modified_base 15: mod_base = OTHER; note = 2'-O-methyladenosine-3'-phosphate
  modified_base 16: mod_base = OTHER; note = 2'-O-methyladenosine-3'-phosphate
  modified_base 17: mod_base = OTHER; note = 2'-O-methylguanosine-3'-phosphate
  modified_base 18: mod_base = OTHER; note = 2'-O-methyladenosine-3'-phosphate
  modified_base 19: mod_base = OTHER; note = 2'-O-methyladenosine-3'-phosphate
  modified_base 20: mod_base = OTHER; note = 2'-O-methyladenosine-3'-phosphate
  modified_base 21: mod_base = OTHER; note = 2'-O-methyladenosine
tacacgacaaatccaagaaaa

SEQ ID NO: 3957 - RNA, 21 nt, synthetic construct
  source 1..21: mol_type = other RNA
  modified_base 1: mod_base = OTHER; note = 2'-O-methyladenosine-3'-phosphate
  modified_base 2: mod_base = OTHER; note = 2'-O-methylcytidine-3'-phosphate
  modified_base 3: mod_base = OTHER; note = 2'-O-methyladenosine-3'-phosphate
  modified_base 4: mod_base = OTHER; note = 2'-O-methylcytidine-3'-phosphate
  modified_base 5: mod_base = OTHER; note = 2'-O-methylguanosine-3'-phosphate
  modified_base 6: mod_base = OTHER; note = 2'-O-methyladenosine-3'-phosphate
  modified_base 7: mod_base = OTHER; note = 2'-deoxy-2'-fluorocytidine-3'-phosphate
  modified_base 8: mod_base = OTHER; note = 2'-O-methyladenosine-3'-phosphate
  modified_base 9: mod_base = OTHER; note = 2'-deoxy-2'-fluoroadenosine-3'-phosphate
  modified_base 10: mod_base = OTHER; note = 2'-deoxy-2'-fluoroadenosine-3'-phosphate
  modified_base 11: mod_base = OTHER; note = 2'-deoxy-2'-fluorouridine-3'-phosphate
  modified_base 12: mod_base = OTHER; note = 2'-O-methylcytidine-3'-phosphate
  modified_base 13: mod_base = OTHER; note = 2'-O-methylcytidine-3'-phosphate
  modified_base 14: mod_base = OTHER; note = 2'-O-methyladenosine-3'-phosphate
  modified_base 15: mod_base = OTHER; note = 2'-O-methyladenosine-3'-phosphate
  modified_base 16: mod_base = OTHER; note = 2'-O-methylguanosine-3'-phosphate
  modified_base 17: mod_base = OTHER; note = 2'-O-methyladenosine-3'-phosphate
  modified_base 18: mod_base = OTHER; note = 2'-O-methyladenosine-3'-phosphate
  modified_base 19: mod_base = OTHER; note = 2'-O-methyladenosine-3'-phosphate
  modified_base 20: mod_base = OTHER; note = 2'-O-methyladenosine-3'-phosphate
  modified_base 21: mod_base = OTHER; note = 2'-O-methyladenosine
acacgacaaatccaagaaaaa

SEQ ID NO: 3958 - RNA, 21 nt, synthetic construct
  source 1..21: mol_type = other RNA
  modified_base 1: mod_base = OTHER; note = 2'-O-methylcytidine-3'-phosphate
  modified_base 2: mod_base = OTHER; note = 2'-O-methyladenosine-3'-phosphate
  modified_base 3: mod_base = OTHER; note = 2'-O-methylcytidine-3'-phosphate
  modified_base 4: mod_base = OTHER; note = 2'-O-methylguanosine-3'-phosphate
  modified_base 5: mod_base = OTHER; note = 2'-O-methyladenosine-3'-phosphate
  modified_base 6: mod_base = OTHER; note = 2'-O-methylcytidine-3'-phosphate
  modified_base 7: mod_base = OTHER; note = 2'-deoxy-2'-fluoroadenosine-3'-phosphate
  modified_base 8: mod_base = OTHER; note = 2'-O-methyladenosine-3'-phosphate
  modified_base 9: mod_base = OTHER; note = 2'-deoxy-2'-fluoroadenosine-3'-phosphate
  modified_base 10: mod_base = OTHER; note = 2'-deoxy-2'-fluorouridine-3'-phosphate
  modified_base 11: mod_base = OTHER; note = 2'-deoxy-2'-fluorocytidine-3'-phosphate
  modified_base 12: mod_base = OTHER; note = 2'-O-methylcytidine-3'-phosphate
  modified_base 13: mod_base = OTHER; note = 2'-O-methyladenosine-3'-phosphate
  modified_base 14: mod_base = OTHER; note = 2'-O-methyladenosine-3'-phosphate
  modified_base 15: mod_base = OTHER; note = 2'-O-methylguanosine-3'-phosphate
  modified_base 16: mod_base = OTHER; note = 2'-O-methyladenosine-3'-phosphate
  modified_base 17: mod_base = OTHER; note = 2'-O-methyladenosine-3'-phosphate
  modified_base 18: mod_base = OTHER; note = 2'-O-methyladenosine-3'-phosphate
  modified_base 19: mod_base = OTHER; note = 2'-O-methyladenosine-3'-phosphate
  modified_base 20: mod_base = OTHER; note = 2'-O-methylcytidine-3'-phosphate
  modified_base 21: mod_base = OTHER; note = 2'-O-methyladenosine
cacgacaaatccaagaaaaca

SEQ ID NO: 3959 - RNA, 21 nt, synthetic construct
  source 1..21: mol_type = other RNA
  modified_base 1: mod_base = OTHER; note = 2'-O-methyladenosine-3'-phosphate
  modified_base 2: mod_base = OTHER; note = 2'-O-methylcytidine-3'-phosphate
  modified_base 3: mod_base = OTHER; note = 2'-O-methylguanosine-3'-phosphate
  modified_base 4: mod_base = OTHER; note = 2'-O-methyladenosine-3'-phosphate
  modified_base 5: mod_base = OTHER; note = 2'-O-methylcytidine-3'-phosphate
  modified_base 6: mod_base = OTHER; note = 2'-O-methyladenosine-3'-phosphate
  modified_base 7: mod_base = OTHER; note = 2'-deoxy-2'-fluoroadenosine-3'-phosphate
  modified_base 8: mod_base = OTHER; note = 2'-O-methyladenosine-3'-phosphate
  modified_base 9: mod_base = OTHER; note = 2'-deoxy-2'-fluorouridine-3'-phosphate
  modified_base 10: mod_base = OTHER; note = 2'-deoxy-2'-fluorocytidine-3'-phosphate
  modified_base 11: mod_base = OTHER; note = 2'-deoxy-2'-fluorocytidine-3'-phosphate
  modified_base 12: mod_base = OTHER; note = 2'-O-methyladenosine-3'-phosphate
  modified_base 13: mod_base = OTHER; note = 2'-O-methyladenosine-3'-phosphate
  modified_base 14: mod_base = OTHER; note = 2'-O-methylguanosine-3'-phosphate
  modified_base 15: mod_base = OTHER; note = 2'-O-methyladenosine-3'-phosphate
  modified_base 16: mod_base = OTHER; note = 2'-O-methyladenosine-3'-phosphate
  modified_base 17: mod_base = OTHER; note = 2'-O-methyladenosine-3'-phosphate
  modified_base 18: mod_base = OTHER; note = 2'-O-methyladenosine-3'-phosphate
  modified_base 19: mod_base = OTHER; note = 2'-O-methylcytidine-3'-phosphate
  modified_base 20: mod_base = OTHER; note = 2'-O-methyluridine-3'-phosphate
  modified_base 21: mod_base = OTHER; note = 2'-O-methyladenosine
acgacaaatccaagaaaacta

SEQ ID NO: 3960 - RNA, 21 nt, synthetic construct
  source 1..21: mol_type = other RNA
  modified_base 1: mod_base = OTHER; note = 2'-O-methylcytidine-3'-phosphate
  modified_base 2: mod_base = OTHER; note = 2'-O-methylguanosine-3'-phosphate
  modified_base 3: mod_base = OTHER; note = 2'-O-methyladenosine-3'-phosphate
  modified_base 4: mod_base = OTHER; note = 2'-O-methylcytidine-3'-phosphate
  modified_base 5: mod_base = OTHER; note = 2'-O-methyladenosine-3'-phosphate
  modified_base 6: mod_base = OTHER; note = 2'-O-methyladenosine-3'-phosphate
  modified_base 7: mod_base = OTHER; note = 2'-deoxy-2'-fluoroadenosine-3'-phosphate
  modified_base 8: mod_base = OTHER; note = 2'-O-methyluridine-3'-phosphate
  modified_base 9: mod_base = OTHER; note = 2'-deoxy-2'-fluorocytidine-3'-phosphate
  modified_base 10: mod_base = OTHER; note = 2'-deoxy-2'-fluorocytidine-3'-phosphate
  modified_base 11: mod_base = OTHER; note = 2'-deoxy-2'-fluoroadenosine-3'-phosphate
  modified_base 12: mod_base = OTHER; note = 2'-O-methyladenosine-3'-phosphate
  modified_base 13: mod_base = OTHER; note = 2'-O-methylguanosine-3'-phosphate
  modified_base 14: mod_base = OTHER; note = 2'-O-methyladenosine-3'-phosphate
  modified_base 15: mod_base = OTHER; note = 2'-O-methyladenosine-3'-phosphate
  modified_base 16: mod_base = OTHER; note = 2'-O-methyladenosine-3'-phosphate
  modified_base 17: mod_base = OTHER; note = 2'-O-methyladenosine-3'-phosphate
  modified_base 18: mod_base = OTHER; note = 2'-O-methylcytidine-3'-phosphate
  modified_base 19: mod_base = OTHER; note = 2'-O-methyluridine-3'-phosphate
  modified_base 20: mod_base = OTHER; note = 2'-O-methyluridine-3'-phosphate
  modified_base 21: mod_base = OTHER; note = 2'-O-methyladenosine
cgacaaatccaagaaaactta

SEQ ID NO: 3961 - RNA, 21 nt, synthetic construct
  source 1..21: mol_type = other RNA
  modified_base 1: mod_base = OTHER; note = 2'-O-methylguanosine-3'-phosphate
  modified_base 2: mod_base = OTHER; note = 2'-O-methyladenosine-3'-phosphate
  modified_base 3: mod_base = OTHER; note = 2'-O-methylcytidine-3'-phosphate
  modified_base 4: mod_base = OTHER; note = 2'-O-methyladenosine-3'-phosphate
  modified_base 5: mod_base = OTHER; note = 2'-O-methyladenosine-3'-phosphate
  modified_base 6: mod_base = OTHER; note = 2'-O-methyladenosine-3'-phosphate
  modified_base 7: mod_base = OTHER; note = 2'-deoxy-2'-fluorouridine-3'-phosphate
  modified_base 8: mod_base = OTHER; note = 2'-O-methylcytidine-3'-phosphate
  modified_base 9: mod_base = OTHER; note = 2'-deoxy-2'-fluorocytidine-3'-phosphate
  modified_base 10: mod_base = OTHER; note = 2'-deoxy-2'-fluoroadenosine-3'-phosphate
  modified_base 11: mod_base = OTHER; note = 2'-deoxy-2'-fluoroadenosine-3'-phosphate
  modified_base 12: mod_base = OTHER; note = 2'-O-methylguanosine-3'-phosphate
  modified_base 13: mod_base = OTHER; note = 2'-O-methyladenosine-3'-phosphate
  modified_base 14: mod_base = OTHER; note = 2'-O-methyladenosine-3'-phosphate
  modified_base 15: mod_base = OTHER; note = 2'-O-methyladenosine-3'-phosphate
  modified_base 16: mod_base = OTHER; note = 2'-O-methyladenosine-3'-phosphate
  modified_base 17: mod_base = OTHER; note = 2'-O-methylcytidine-3'-phosphate
  modified_base 18: mod_base = OTHER; note = 2'-O-methyluridine-3'-phosphate
  modified_base 19: mod_base = OTHER; note = 2'-O-methyluridine-3'-phosphate
  modified_base 20: mod_base = OTHER; note = 2'-O-methyluridine-3'-phosphate
  modified_base 21: mod_base = OTHER; note = 2'-O-methyladenosine
gacaaatccaagaaaacttta

SEQ ID NO: 3962 - RNA, 21 nt, synthetic construct
  source 1..21: mol_type = other RNA
  modified_base 1: mod_base = OTHER; note = 2'-O-methyladenosine-3'-phosphate
  modified_base 2: mod_base = OTHER; note = 2'-O-methylcytidine-3'-phosphate
  modified_base 3: mod_base = OTHER; note = 2'-O-methyladenosine-3'-phosphate
  modified_base 4: mod_base = OTHER; note = 2'-O-methyladenosine-3'-phosphate
  modified_base 5: mod_base = OTHER; note = 2'-O-methyladenosine-3'-phosphate
  modified_base 6: mod_base = OTHER; note = 2'-O-methyluridine-3'-phosphate
  modified_base 7: mod_base = OTHER; note = 2'-deoxy-2'-fluorocytidine-3'-phosphate
  modified_base 8: mod_base = OTHER; note = 2'-O-methylcytidine-3'-phosphate
  modified_base 9: mod_base = OTHER; note = 2'-deoxy-2'-fluoroadenosine-3'-phosphate
  modified_base 10: mod_base = OTHER; note = 2'-deoxy-2'-fluoroadenosine-3'-phosphate
  modified_base 11: mod_base = OTHER; note = 2'-deoxy-2'-fluoroguanosine-3'-phosphate
  modified_base 12: mod_base = OTHER; note = 2'-O-methyladenosine-3'-phosphate
  modified_base 13: mod_base = OTHER; note = 2'-O-methyladenosine-3'-phosphate
  modified_base 14: mod_base = OTHER; note = 2'-O-methyladenosine-3'-phosphate
  modified_base 15: mod_base = OTHER; note = 2'-O-methyladenosine-3'-phosphate
  modified_base 16: mod_base = OTHER; note = 2'-O-methylcytidine-3'-phosphate
  modified_base 17: mod_base = OTHER; note = 2'-O-methyluridine-3'-phosphate
  modified_base 18: mod_base = OTHER; note = 2'-O-methyluridine-3'-phosphate
  modified_base 19: mod_base = OTHER; note = 2'-O-methyluridine-3'-phosphate
  modified_base 20: mod_base = OTHER; note = 2'-O-methyladenosine-3'-phosphate
  modified_base 21: mod_base = OTHER; note = 2'-O-methyladenosine
acaaatccaagaaaactttaa

SEQ ID NO: 3963 - RNA, 21 nt, synthetic construct
  source 1..21: mol_type = other RNA
  modified_base 1: mod_base = OTHER; note = 2'-O-methylcytidine-3'-phosphate
  modified_base 2: mod_base = OTHER; note = 2'-O-methyladenosine-3'-phosphate
  modified_base 3: mod_base = OTHER; note = 2'-O-methyladenosine-3'-phosphate
  modified_base 4: mod_base = OTHER; note = 2'-O-methyladenosine-3'-phosphate
  modified_base 5: mod_base = OTHER; note = 2'-O-methyluridine-3'-phosphate
  modified_base 6: mod_base = OTHER; note = 2'-O-methylcytidine-3'-phosphate
  modified_base 7: mod_base = OTHER; note = 2'-deoxy-2'-fluorocytidine-3'-phosphate
  modified_base 8: mod_base = OTHER; note = 2'-O-methyladenosine-3'-phosphate
  modified_base 9: mod_base = OTHER; note = 2'-deoxy-2'-fluoroadenosine-3'-phosphate
  modified_base 10: mod_base = OTHER; note = 2'-deoxy-2'-fluoroguanosine-3'-phosphate
  modified_base 11: mod_base = OTHER; note = 2'-deoxy-2'-fluoroadenosine-3'-phosphate
  modified_base 12: mod_base = OTHER; note = 2'-O-methyladenosine-3'-phosphate
  modified_base 13: mod_base = OTHER; note = 2'-O-methyladenosine-3'-phosphate
  modified_base 14: mod_base = OTHER; note = 2'-O-methyladenosine-3'-phosphate
  modified_base 15: mod_base = OTHER; note = 2'-O-methylcytidine-3'-phosphate
  modified_base 16: mod_base = OTHER; note = 2'-O-methyluridine-3'-phosphate
  modified_base 17: mod_base = OTHER; note = 2'-O-methyluridine-3'-phosphate
  modified_base 18: mod_base = OTHER; note = 2'-O-methyluridine-3'-phosphate
  modified_base 19: mod_base = OTHER; note = 2'-O-methyladenosine-3'-phosphate
  modified_base 20: mod_base = OTHER; note = 2'-O-methylcytidine-3'-phosphate
  modified_base 21: mod_base = OTHER; note = 2'-O-methyladenosine
caaatccaagaaaactttaca

SEQ ID NO: 3964 - RNA, 21 nt, synthetic construct
  source 1..21: mol_type = other RNA
  modified_base 1: mod_base = OTHER; note = 2'-O-methyladenosine-3'-phosphate
  modified_base 2: mod_base = OTHER; note = 2'-O-methyladenosine-3'-phosphate
  modified_base 3: mod_base = OTHER; note = 2'-O-methyladenosine-3'-phosphate
  modified_base 4: mod_base = OTHER; note = 2'-O-methyluridine-3'-phosphate
  modified_base 5: mod_base = OTHER; note = 2'-O-methylcytidine-3'-phosphate
  modified_base 6: mod_base = OTHER; note = 2'-O-methylcytidine-3'-phosphate
  modified_base 7: mod_base = OTHER; note = 2'-deoxy-2'-fluoroadenosine-3'-phosphate
  modified_base 8: mod_base = OTHER; note = 2'-O-methyladenosine-3'-phosphate
  modified_base 9: mod_base = OTHER; note = 2'-deoxy-2'-fluoroguanosine-3'-phosphate
  modified_base 10: mod_base = OTHER; note = 2'-deoxy-2'-fluoroadenosine-3'-phosphate
  modified_base 11: mod_base = OTHER; note = 2'-deoxy-2'-fluoroadenosine-3'-phosphate
  modified_base 12: mod_base = OTHER; note = 2'-O-methyladenosine-3'-phosphate
  modified_base 13: mod_base = OTHER; note = 2'-O-methyladenosine-3'-phosphate
  modified_base 14: mod_base = OTHER; note = 2'-O-methylcytidine-3'-phosphate
  modified_base 15: mod_base = OTHER; note = 2'-O-methyluridine-3'-phosphate
  modified_base 16: mod_base = OTHER; note = 2'-O-methyluridine-3'-phosphate
  modified_base 17: mod_base = OTHER; note = 2'-O-methyluridine-3'-phosphate
  modified_base 18: mod_base = OTHER; note = 2'-O-methyladenosine-3'-phosphate
  modified_base 19: mod_base = OTHER; note = 2'-O-methylcytidine-3'-phosphate
  modified_base 20: mod_base = OTHER; note = 2'-O-methylguanosine-3'-phosphate
  modified_base 21: mod_base = OTHER; note = 2'-O-methyladenosine
aaatccaagaaaactttacga

SEQ ID NO: 3965 - RNA, 21 nt, synthetic construct
  source 1..21: mol_type = other RNA
  modified_base 1: mod_base = OTHER; note = 2'-O-methyladenosine-3'-phosphate
  modified_base 2: mod_base = OTHER; note = 2'-O-methyladenosine-3'-phosphate
  modified_base 3: mod_base = OTHER; note = 2'-O-methyluridine-3'-phosphate
  modified_base 4: mod_base = OTHER; note = 2'-O-methylcytidine-3'-phosphate
  modified_base 5: mod_base = OTHER; note = 2'-O-methylcytidine-3'-phosphate
  modified_base 6: mod_base = OTHER; note = 2'-O-methyladenosine-3'-phosphate
  modified_base 7: mod_base = OTHER; note = 2'-deoxy-2'-fluoroadenosine-3'-phosphate
  modified_base 8: mod_base = OTHER; note = 2'-O-methylguanosine-3'-phosphate
  modified_base 9: mod_base = OTHER; note = 2'-deoxy-2'-fluoroadenosine-3'-phosphate
  modified_base 10: mod_base = OTHER; note = 2'-deoxy-2'-fluoroadenosine-3'-phosphate
  modified_base 11: mod_base = OTHER; note = 2'-deoxy-2'-fluoroadenosine-3'-phosphate
  modified_base 12: mod_base = OTHER; note = 2'-O-methyladenosine-3'-phosphate
  modified_base 13: mod_base = OTHER; note = 2'-O-methylcytidine-3'-phosphate
  modified_base 14: mod_base = OTHER; note = 2'-O-methyluridine-3'-phosphate
  modified_base 15: mod_base = OTHER; note = 2'-O-methyluridine-3'-phosphate
  modified_base 16: mod_base = OTHER; note = 2'-O-methyluridine-3'-phosphate
  modified_base 17: mod_base = OTHER; note = 2'-O-methyladenosine-3'-phosphate
  modified_base 18: mod_base = OTHER; note = 2'-O-methylcytidine-3'-phosphate
  modified_base 19: mod_base = OTHER; note = 2'-O-methylguanosine-3'-phosphate
  modified_base 20: mod_base = OTHER; note = 2'-O-methyladenosine-3'-phosphate
  modified_base 21: mod_base = OTHER; note = 2'-O-methyladenosine
aatccaagaaaactttacgaa

SEQ ID NO: 3966 - RNA, 21 nt, synthetic construct
  source 1..21: mol_type = other RNA
  modified_base 1: mod_base = OTHER; note = 2'-O-methyladenosine-3'-phosphate
  modified_base 2: mod_base = OTHER; note = 2'-O-methyluridine-3'-phosphate
  modified_base 3: mod_base = OTHER; note = 2'-O-methylcytidine-3'-phosphate
  modified_base 4: mod_base = OTHER; note = 2'-O-methylcytidine-3'-phosphate
  modified_base 5: mod_base = OTHER; note = 2'-O-methyladenosine-3'-phosphate
  modified_base 6: mod_base = OTHER; note = 2'-O-methyladenosine-3'-phosphate
  modified_base 7: mod_base = OTHER; note = 2'-deoxy-2'-fluoroguanosine-3'-phosphate
  modified_base 8: mod_base = OTHER; note = 2'-O-methyladenosine-3'-phosphate
  modified_base 9: mod_base = OTHER; note = 2'-deoxy-2'-fluoroadenosine-3'-phosphate
  modified_base 10: mod_base = OTHER; note = 2'-deoxy-2'-fluoroadenosine-3'-phosphate
  modified_base 11: mod_base = OTHER; note = 2'-deoxy-2'-fluoroadenosine-3'-phosphate
  modified_base 12: mod_base = OTHER; note = 2'-O-methylcytidine-3'-phosphate
  modified_base 13: mod_base = OTHER; note = 2'-O-methyluridine-3'-phosphate
  modified_base 14: mod_base = OTHER; note = 2'-O-methyluridine-3'-phosphate
  modified_base 15: mod_base = OTHER; note = 2'-O-methyluridine-3'-phosphate
  modified_base 16: mod_base = OTHER; note = 2'-O-methyladenosine-3'-phosphate
  modified_base 17: mod_base = OTHER; note = 2'-O-methylcytidine-3'-phosphate
  modified_base 18: mod_base = OTHER; note = 2'-O-methylguanosine-3'-phosphate
  modified_base 19: mod_base = OTHER; note = 2'-O-methyladenosine-3'-phosphate
  modified_base 20: mod_base = OTHER; note = 2'-O-methylcytidine-3'-phosphate
  modified_base 21: mod_base = OTHER; note = 2'-O-methyladenosine
atccaagaaaactttacgaca

SEQ ID NO: 3967 - RNA, 21 nt, synthetic construct
  source 1..21: mol_type = other RNA
  modified_base 1: mod_base = OTHER; note = 2'-O-methyluridine-3'-phosphate
  modified_base 2: mod_base = OTHER; note = 2'-O-methylcytidine-3'-phosphate
  modified_base 3: mod_base = OTHER; note = 2'-O-methylcytidine-3'-phosphate
  modified_base 4: mod_base = OTHER; note = 2'-O-methyladenosine-3'-phosphate
  modified_base 5: mod_base = OTHER; note = 2'-O-methyladenosine-3'-phosphate
  modified_base 6: mod_base = OTHER; note = 2'-O-methylguanosine-3'-phosphate
  modified_base 7: mod_base = OTHER; note = 2'-deoxy-2'-fluoroadenosine-3'-phosphate
  modified_base 8: mod_base = OTHER; note = 2'-O-methyladenosine-3'-phosphate
  modified_base 9: mod_base = OTHER; note = 2'-deoxy-2'-fluoroadenosine-3'-phosphate
  modified_base 10: mod_base = OTHER; note = 2'-deoxy-2'-fluoroadenosine-3'-phosphate
  modified_base 11: mod_base = OTHER; note = 2'-deoxy-2'-fluorocytidine-3'-phosphate
  modified_base 12: mod_base = OTHER; note = 2'-O-methyluridine-3'-phosphate
  modified_base 13: mod_base = OTHER; note = 2'-O-methyluridine-3'-phosphate
  modified_base 14: mod_base = OTHER; note = 2'-O-methyluridine-3'-phosphate
  modified_base 15: mod_base = OTHER; note = 2'-O-methyladenosine-3'-phosphate
  modified_base 16: mod_base = OTHER; note = 2'-O-methylcytidine-3'-phosphate
  modified_base 17: mod_base = OTHER; note = 2'-O-methylguanosine-3'-phosphate
  modified_base 18: mod_base = OTHER; note = 2'-O-methyladenosine-3'-phosphate
  modified_base 19: mod_base = OTHER; note = 2'-O-methylcytidine-3'-phosphate
  modified_base 20: mod_base = OTHER; note = 2'-O-methyluridine-3'-phosphate
  modified_base 21: mod_base = OTHER; note = 2'-O-methyladenosine
tccaagaaaactttacgacta

SEQ ID NO: 3968 - RNA, 21 nt, synthetic construct
  source 1..21: mol_type = other RNA
  modified_base 1: mod_base = OTHER; note = 2'-O-methylcytidine-3'-phosphate
  modified_base 2: mod_base = OTHER; note = 2'-O-methylcytidine-3'-phosphate
  modified_base 3: mod_base = OTHER; note = 2'-O-methyladenosine-3'-phosphate
  modified_base 4: mod_base = OTHER; note = 2'-O-methyladenosine-3'-phosphate
  modified_base 5: mod_base = OTHER; note = 2'-O-methylguanosine-3'-phosphate
  modified_base 6: mod_base = OTHER; note = 2'-O-methyladenosine-3'-phosphate
  modified_base 7: mod_base = OTHER; note = 2'-deoxy-2'-fluoroadenosine-3'-phosphate
  modified_base 8: mod_base = OTHER; note = 2'-O-methyladenosine-3'-phosphate
  modified_base 9: mod_base = OTHER; note = 2'-deoxy-2'-fluoroadenosine-3'-phosphate
  modified_base 10: mod_base = OTHER; note = 2'-deoxy-2'-fluorocytidine-3'-phosphate
  modified_base 11: mod_base = OTHER; note = 2'-deoxy-2'-fluorouridine-3'-phosphate
  modified_base 12: mod_base = OTHER; note = 2'-O-methyluridine-3'-phosphate
  modified_base 13: mod_base = OTHER; note = 2'-O-methyluridine-3'-phosphate
  modified_base 14: mod_base = OTHER; note = 2'-O-methyladenosine-3'-phosphate
  modified_base 15: mod_base = OTHER; note = 2'-O-methylcytidine-3'-phosphate
  modified_base 16: mod_base = OTHER; note = 2'-O-methylguanosine-3'-phosphate
  modified_base 17: mod_base = OTHER; note = 2'-O-methyladenosine-3'-phosphate
  modified_base 18: mod_base = OTHER; note = 2'-O-methylcytidine-3'-phosphate
  modified_base 19: mod_base = OTHER; note = 2'-O-methyluridine-3'-phosphate
  modified_base 20: mod_base = OTHER; note = 2'-O-methyladenosine-3'-phosphate
  modified_base 21: mod_base = OTHER; note = 2'-O-methyladenosine
ccaagaaaactttacgactaa

SEQ ID NO: 3969 - RNA, 21 nt, synthetic construct
  source 1..21: mol_type = other RNA
  modified_base 1: mod_base = OTHER; note = 2'-O-methyladenosine-3'-phosphate
  modified_base 2: mod_base = OTHER; note = 2'-O-methyladenosine-3'-phosphate
  modified_base 3: mod_base = OTHER; note = 2'-O-methylguanosine-3'-phosphate
  modified_base 4: mod_base = OTHER; note = 2'-O-methyladenosine-3'-phosphate
  modified_base 5: mod_base = OTHER; note = 2'-O-methyladenosine-3'-phosphate
  modified_base 6: mod_base = OTHER; note = 2'-O-methyladenosine-3'-phosphate
  modified_base 7: mod_base = OTHER; note = 2'-deoxy-2'-fluoroadenosine-3'-phosphate
  modified_base 8: mod_base = OTHER; note = 2'-O-methylcytidine-3'-phosphate
  modified_base 9: mod_base = OTHER; note = 2'-deoxy-2'-fluorouridine-3'-phosphate
  modified_base 10: mod_base = OTHER; note = 2'-deoxy-2'-fluorouridine-3'-phosphate
  modified_base 11: mod_base = OTHER; note = 2'-deoxy-2'-fluorouridine-3'-phosphate
  modified_base 12: mod_base = OTHER; note = 2'-O-methyladenosine-3'-phosphate
  modified_base 13: mod_base = OTHER; note = 2'-O-methylcytidine-3'-phosphate
  modified_base 14: mod_base = OTHER; note = 2'-O-methylguanosine-3'-phosphate
  modified_base 15: mod_base = OTHER; note = 2'-O-methyladenosine-3'-phosphate
  modified_base 16: mod_base = OTHER; note = 2'-O-methylcytidine-3'-phosphate
  modified_base 17: mod_base = OTHER; note = 2'-O-methyluridine-3'-phosphate
  modified_base 18: mod_base = OTHER; note = 2'-O-methyladenosine-3'-phosphate
  modified_base 19: mod_base = OTHER; note = 2'-O-methylcytidine-3'-phosphate
  modified_base 20: mod_base = OTHER; note = 2'-O-methyluridine-3'-phosphate
  modified_base 21: mod_base = OTHER; note = 2'-O-methyladenosine
aagaaaactttacgactacta

SEQ ID NO: 3970 - RNA, 21 nt, synthetic construct
  source 1..21: mol_type = other RNA
  modified_base 1: mod_base = OTHER; note = 2'-O-methyladenosine-3'-phosphate
  modified_base 2: mod_base = OTHER; note = 2'-O-methylguanosine-3'-phosphate
  modified_base 3: mod_base = OTHER; note = 2'-O-methyladenosine-3'-phosphate
  modified_base 4: mod_base = OTHER; note = 2'-O-methyladenosine-3'-phosphate
  modified_base 5: mod_base = OTHER; note = 2'-O-methyladenosine-3'-phosphate
  modified_base 6: mod_base = OTHER; note = 2'-O-methyladenosine-3'-phosphate
  modified_base 7: mod_base = OTHER; note = 2'-deoxy-2'-fluorocytidine-3'-phosphate
  modified_base 8: mod_base = OTHER; note = 2'-O-methyluridine-3'-phosphate
  modified_base 9: mod_base = OTHER; note = 2'-deoxy-2'-fluorouridine-3'-phosphate
  modified_base 10: mod_base = OTHER; note = 2'-deoxy-2'-fluorouridine-3'-phosphate
  modified_base 11: mod_base = OTHER; note = 2'-deoxy-2'-fluoroadenosine-3'-phosphate
  modified_base 12: mod_base = OTHER; note = 2'-O-methylcytidine-3'-phosphate
  modified_base 13: mod_base = OTHER; note = 2'-O-methylguanosine-3'-phosphate
  modified_base 14: mod_base = OTHER; note = 2'-O-methyladenosine-3'-phosphate
  modified_base 15: mod_base = OTHER; note = 2'-O-methylcytidine-3'-phosphate
  modified_base 16: mod_base = OTHER; note = 2'-O-methyluridine-3'-phosphate
  modified_base 17: mod_base = OTHER; note = 2'-O-methyladenosine-3'-phosphate
  modified_base 18: mod_base = OTHER; note = 2'-O-methylcytidine-3'-phosphate
  modified_base 19: mod_base = OTHER; note = 2'-O-methyluridine-3'-phosphate
  modified_base 20: mod_base = OTHER; note = 2'-O-methylguanosine-3'-phosphate
  modified_base 21: mod_base = OTHER; note = 2'-O-methyladenosine
agaaaactttacgactactga

SEQ ID NO: 3971 - RNA, 21 nt, synthetic construct
  source 1..21: mol_type = other RNA
  modified_base 1: mod_base = OTHER; note = 2'-O-methylguanosine-3'-phosphate
  modified_base 2: mod_base = OTHER; note = 2'-O-methyladenosine-3'-phosphate
  modified_base 3: mod_base = OTHER; note = 2'-O-methyladenosine-3'-phosphate
  modified_base 4: mod_base = OTHER; note = 2'-O-methyladenosine-3'-phosphate
  modified_base 5: mod_base = OTHER; note = 2'-O-methyladenosine-3'-phosphate
  modified_base 6: mod_base = OTHER; note = 2'-O-methylcytidine-3'-phosphate
  modified_base 7: mod_base = OTHER; note = 2'-deoxy-2'-fluorouridine-3'-phosphate
  modified_base 8: mod_base = OTHER; note = 2'-O-methyluridine-3'-phosphate
  modified_base 9: mod_base = OTHER; note = 2'-deoxy-2'-fluorouridine-3'-phosphate
  modified_base 10: mod_base = OTHER; note = 2'-deoxy-2'-fluoroadenosine-3'-phosphate
  modified_base 11: mod_base = OTHER; note = 2'-deoxy-2'-fluorocytidine-3'-phosphate
  modified_base 12: mod_base = OTHER; note = 2'-O-methylguanosine-3'-phosphate
  modified_base 13: mod_base = OTHER; note = 2'-O-methyladenosine-3'-phosphate
  modified_base 14: mod_base = OTHER; note = 2'-O-methylcytidine-3'-phosphate
  modified_base 15: mod_base = OTHER; note = 2'-O-methyluridine-3'-phosphate
  modified_base 16: mod_base = OTHER; note = 2'-O-methyladenosine-3'-phosphate
  modified_base 17: mod_base = OTHER; note = 2'-O-methylcytidine-3'-phosphate
  modified_base 18: mod_base = OTHER; note = 2'-O-methyluridine-3'-phosphate
  modified_base 19: mod_base = OTHER; note = 2'-O-methylguanosine-3'-phosphate
  modified_base 20: mod_base = OTHER; note = 2'-O-methyluridine-3'-phosphate
  modified_base 21: mod_base = OTHER; note = 2'-O-methyladenosine
gaaaactttacgactactgta

SEQ ID NO: 3972 - RNA, 21 nt, synthetic construct
  source 1..21: mol_type = other RNA
  modified_base 1: mod_base = OTHER; note = 2'-O-methyladenosine-3'-phosphate
  modified_base 2: mod_base = OTHER; note = 2'-O-methyladenosine-3'-phosphate
  modified_base 3: mod_base = OTHER; note = 2'-O-methyladenosine-3'-phosphate
  modified_base 4: mod_base = OTHER; note = 2'-O-methyladenosine-3'-phosphate
  modified_base 5: mod_base = OTHER; note = 2'-O-methylcytidine-3'-phosphate
  modified_base 6: mod_base = OTHER; note = 2'-O-methyluridine-3'-phosphate
  modified_base 7: mod_base = OTHER; note = 2'-deoxy-2'-fluorouridine-3'-phosphate
  modified_base 8: mod_base = OTHER; note = 2'-O-methyluridine-3'-phosphate
  modified_base 9: mod_base = OTHER; note = 2'-deoxy-2'-fluoroadenosine-3'-phosphate
  modified_base 10: mod_base = OTHER; note = 2'-deoxy-2'-fluorocytidine-3'-phosphate
  modified_base 11: mod_base = OTHER; note = 2'-deoxy-2'-fluoroguanosine-3'-phosphate
  modified_base 12: mod_base = OTHER; note = 2'-O-methyladenosine-3'-phosphate
  modified_base 13: mod_base = OTHER; note = 2'-O-methylcytidine-3'-phosphate
  modified_base 14: mod_base = OTHER; note = 2'-O-methyluridine-3'-phosphate
  modified_base 15: mod_base = OTHER; note = 2'-O-methyladenosine-3'-phosphate
  modified_base 16: mod_base = OTHER; note = 2'-O-methylcytidine-3'-phosphate
  modified_base 17: mod_base = OTHER; note = 2'-O-methyluridine-3'-phosphate
  modified_base 18: mod_base = OTHER; note = 2'-O-methylguanosine-3'-phosphate
  modified_base 19: mod_base = OTHER; note = 2'-O-methyluridine-3'-phosphate
  modified_base 20: mod_base = OTHER; note = 2'-O-methylguanosine-3'-phosphate
  modified_base 21: mod_base = OTHER; note = 2'-O-methyladenosine
aaaactttacgactactgtga

SEQ ID NO: 3973 - RNA, 21 nt, synthetic construct
  source 1..21: mol_type = other RNA
  modified_base 1: mod_base = OTHER; note = 2'-O-methyladenosine-3'-phosphate
  modified_base 2: mod_base = OTHER; note = 2'-O-methyladenosine-3'-phosphate
  modified_base 3: mod_base = OTHER; note = 2'-O-methyladenosine-3'-phosphate
  modified_base 4: mod_base = OTHER; note = 2'-O-methylcytidine-3'-phosphate
  modified_base 5: mod_base = OTHER; note = 2'-O-methyluridine-3'-phosphate
  modified_base 6: mod_base = OTHER; note = 2'-O-methyluridine-3'-phosphate
  modified_base 7: mod_base = OTHER; note = 2'-deoxy-2'-fluorouridine-3'-phosphate
  modified_base 8: mod_base = OTHER; note = 2'-O-methyladenosine-3'-phosphate
  modified_base 9: mod_base = OTHER; note = 2'-deoxy-2'-fluorocytidine-3'-phosphate
  modified_base 10: mod_base = OTHER; note = 2'-deoxy-2'-fluoroguanosine-3'-phosphate
  modified_base 11: mod_base = OTHER; note = 2'-deoxy-2'-fluoroadenosine-3'-phosphate
  modified_base 12: mod_base = OTHER; note = 2'-O-methylcytidine-3'-phosphate
  modified_base 13: mod_base = OTHER; note = 2'-O-methyluridine-3'-phosphate
  modified_base 14: mod_base = OTHER; note = 2'-O-methyladenosine-3'-phosphate
  modified_base 15: mod_base = OTHER; note = 2'-O-methylcytidine-3'-phosphate
  modified_base 16: mod_base = OTHER; note = 2'-O-methyluridine-3'-phosphate
  modified_base 17: mod_base = OTHER; note = 2'-O-methylguanosine-3'-phosphate
  modified_base 18: mod_base = OTHER; note = 2'-O-methyluridine-3'-phosphate
  modified_base 19: mod_base = OTHER; note = 2'-O-methylguanosine-3'-phosphate
  modified_base 20: mod_base = OTHER; note = 2'-O-methyladenosine-3'-phosphate
  modified_base 21: mod_base = OTHER; note = 2'-O-methyladenosine
aaactttacgactactgtgaa

SEQ ID NO: 3974 - RNA, 21 nt, synthetic construct
  source 1..21: mol_type = other RNA
  modified_base 1: mod_base = OTHER; note = 2'-O-methyladenosine-3'-phosphate
  modified_base 2: mod_base = OTHER; note = 2'-O-methyladenosine-3'-phosphate
  modified_base 3: mod_base = OTHER; note = 2'-O-methylcytidine-3'-phosphate
  modified_base 4: mod_base = OTHER; note = 2'-O-methyluridine-3'-phosphate
  modified_base 5: mod_base = OTHER; note = 2'-O-methyluridine-3'-phosphate
  modified_base 6: mod_base = OTHER; note = 2'-O-methyluridine-3'-phosphate
  modified_base 7: mod_base = OTHER; note = 2'-deoxy-2'-fluoroadenosine-3'-phosphate
  modified_base 8: mod_base = OTHER; note = 2'-O-methylcytidine-3'-phosphate
  modified_base 9: mod_base = OTHER; note = 2'-deoxy-2'-fluoroguanosine-3'-phosphate
  modified_base 10: mod_base = OTHER; note = 2'-deoxy-2'-fluoroadenosine-3'-phosphate
  modified_base 11: mod_base = OTHER; note = 2'-deoxy-2'-fluorocytidine-3'-phosphate
  modified_base 12: mod_base = OTHER; note = 2'-O-methyluridine-3'-phosphate
  modified_base 13: mod_base = OTHER; note = 2'-O-methyladenosine-3'-phosphate
  modified_base 14: mod_base = OTHER; note = 2'-O-methylcytidine-3'-phosphate
  modified_base 15: mod_base = OTHER; note = 2'-O-methyluridine-3'-phosphate
  modified_base 16: mod_base = OTHER; note = 2'-O-methylguanosine-3'-phosphate
  modified_base 17: mod_base = OTHER; note = 2'-O-methyluridine-3'-phosphate
  modified_base 18: mod_base = OTHER; note = 2'-O-methylguanosine-3'-phosphate
  modified_base 19: mod_base = OTHER; note = 2'-O-methyladenosine-3'-phosphate
  modified_base 20: mod_base = OTHER; note = 2'-O-methyluridine-3'-phosphate
  modified_base 21: mod_base = OTHER; note = 2'-O-methyladenosine
aactttacgactactgtgata

SEQ ID NO: 3975 - RNA, 21 nt, synthetic construct
  source 1..21: mol_type = other RNA
  modified_base 1: mod_base = OTHER; note = 2'-O-methyladenosine-3'-phosphate
  modified_base 2: mod_base = OTHER; note = 2'-O-methylcytidine-3'-phosphate
  modified_base 3: mod_base = OTHER; note = 2'-O-methyluridine-3'-phosphate
  modified_base 4: mod_base = OTHER; note = 2'-O-methyluridine-3'-phosphate
  modified_base 5: mod_base = OTHER; note = 2'-O-methyluridine-3'-phosphate
  modified_base 6: mod_base = OTHER; note = 2'-O-methyladenosine-3'-phosphate
  modified_base 7: mod_base = OTHER; note = 2'-deoxy-2'-fluorocytidine-3'-phosphate
  modified_base 8: mod_base = OTHER; note = 2'-O-methylguanosine-3'-phosphate
  modified_base 9: mod_base = OTHER; note = 2'-deoxy-2'-fluoroadenosine-3'-phosphate
  modified_base 10: mod_base = OTHER; note = 2'-deoxy-2'-fluorocytidine-3'-phosphate
  modified_base 11: mod_base = OTHER; note = 2'-deoxy-2'-fluorouridine-3'-phosphate
  modified_base 12: mod_base = OTHER; note = 2'-O-methyladenosine-3'-phosphate
  modified_base 13: mod_base = OTHER; note = 2'-O-methylcytidine-3'-phosphate
  modified_base 14: mod_base = OTHER; note = 2'-O-methyluridine-3'-phosphate
  modified_base 15: mod_base = OTHER; note = 2'-O-methylguanosine-3'-phosphate
  modified_base 16: mod_base = OTHER; note = 2'-O-methyluridine-3'-phosphate
  modified_base 17: mod_base = OTHER; note = 2'-O-methylguanosine-3'-phosphate
  modified_base 18: mod_base = OTHER; note = 2'-O-methyladenosine-3'-phosphate
  modified_base 19: mod_base = OTHER; note = 2'-O-methyluridine-3'-phosphate
  modified_base 20: mod_base = OTHER; note = 2'-O-methylguanosine-3'-phosphate
  modified_base 21: mod_base = OTHER; note = 2'-O-methyladenosine
actttacgactactgtgatga

SEQ ID NO: 3976 - RNA, 21 nt, synthetic construct
  source 1..21: mol_type = other RNA
  modified_base 1: mod_base = OTHER; note = 2'-O-methylcytidine-3'-phosphate
  modified_base 2: mod_base = OTHER; note = 2'-O-methyluridine-3'-phosphate
  modified_base 3: mod_base = OTHER; note = 2'-O-methyluridine-3'-phosphate
  modified_base 4: mod_base = OTHER; note = 2'-O-methyluridine-3'-phosphate
  modified_base 5: mod_base = OTHER; note = 2'-O-methyladenosine-3'-phosphate
  modified_base 6: mod_base = OTHER; note = 2'-O-methylcytidine-3'-phosphate
  modified_base 7: mod_base = OTHER; note = 2'-deoxy-2'-fluoroguanosine-3'-phosphate
  modified_base 8: mod_base = OTHER; note = 2'-O-methyladenosine-3'-phosphate
  modified_base 9: mod_base = OTHER; note = 2'-deoxy-2'-fluorocytidine-3'-phosphate
  modified_base 10: mod_base = OTHER; note = 2'-deoxy-2'-fluorouridine-3'-phosphate
  modified_base 11: mod_base = OTHER; note = 2'-deoxy-2'-fluoroadenosine-3'-phosphate
  modified_base 12: mod_base = OTHER; note = 2'-O-methylcytidine-3'-phosphate
  modified_base 13: mod_base = OTHER; note = 2'-O-methyluridine-3'-phosphate
  modified_base 14: mod_base = OTHER; note = 2'-O-methylguanosine-3'-phosphate
  modified_base 15: mod_base = OTHER; note = 2'-O-methyluridine-3'-phosphate
  modified_base 16: mod_base = OTHER; note = 2'-O-methylguanosine-3'-phosphate
  modified_base 17: mod_base = OTHER; note = 2'-O-methyladenosine-3'-phosphate
  modified_base 18: mod_base = OTHER; note = 2'-O-methyluridine-3'-phosphate
  modified_base 19: mod_base = OTHER; note = 2'-O-methylguanosine-3'-phosphate
  modified_base 20: mod_base = OTHER; note = 2'-O-methyluridine-3'-phosphate
  modified_base 21: mod_base = OTHER; note = 2'-O-methyladenosine
ctttacgactactgtgatgta

SEQ ID NO: 3977 - RNA, 21 nt, synthetic construct
  source 1..21: mol_type = other RNA
  modified_base 1: mod_base = OTHER; note = 2'-O-methyluridine-3'-phosphate
  modified_base 2: mod_base = OTHER; note = 2'-O-methyluridine-3'-phosphate
  modified_base 3: mod_base = OTHER; note = 2'-O-methyluridine-3'-phosphate
  modified_base 4: mod_base = OTHER; note = 2'-O-methyladenosine-3'-phosphate
  modified_base 5: mod_base = OTHER; note = 2'-O-methylcytidine-3'-phosphate
  modified_base 6: mod_base = OTHER; note = 2'-O-methylguanosine-3'-phosphate
  modified_base 7: mod_base = OTHER; note = 2'-deoxy-2'-fluoroadenosine-3'-phosphate
  modified_base 8: mod_base = OTHER; note = 2'-O-methylcytidine-3'-phosphate
  modified_base 9: mod_base = OTHER; note = 2'-deoxy-2'-fluorouridine-3'-phosphate
  modified_base 10: mod_base = OTHER; note = 2'-deoxy-2'-fluoroadenosine-3'-phosphate
  modified_base 11: mod_base = OTHER; note = 2'-deoxy-2'-fluorocytidine-3'-phosphate
  modified_base 12: mod_base = OTHER; note = 2'-O-methyluridine-3'-phosphate
  modified_base 13: mod_base = OTHER; note = 2'-O-methylguanosine-3'-phosphate
  modified_base 14: mod_base = OTHER; note = 2'-O-methyluridine-3'-phosphate
  modified_base 15: mod_base = OTHER; note = 2'-O-methylguanosine-3'-phosphate
  modified_base 16: mod_base = OTHER; note = 2'-O-methyladenosine-3'-phosphate
  modified_base 17: mod_base = OTHER; note = 2'-O-methyluridine-3'-phosphate
  modified_base 18: mod_base = OTHER; note = 2'-O-methylguanosine-3'-phosphate
  modified_base 19: mod_base = OTHER; note = 2'-O-methyluridine-3'-phosphate
  modified_base 20: mod_base = OTHER; note = 2'-O-methylcytidine-3'-phosphate
  modified_base 21: mod_base = OTHER; note = 2'-O-methyladenosine
tttacgactactgtgatgtca

SEQ ID NO: 3978 - RNA, 21 nt, synthetic construct
  source 1..21: mol_type = other RNA
  modified_base 1: mod_base = OTHER; note = 2'-O-methylguanosine-3'-phosphate
  modified_base 2: mod_base = OTHER; note = 2'-O-methyladenosine-3'-phosphate
  modified_base 3: mod_base = OTHER; note = 2'-O-methylcytidine-3'-phosphate
  modified_base 4: mod_base = OTHER; note = 2'-O-methyluridine-3'-phosphate
  modified_base 5: mod_base = OTHER; note = 2'-O-methyladenosine-3'-phosphate
  modified_base 6: mod_base = OTHER; note = 2'-O-methylcytidine-3'-phosphate
  modified_base 7: mod_base = OTHER; note = 2'-deoxy-2'-fluorouridine-3'-phosphate
  modified_base 8: mod_base = OTHER; note = 2'-O-methylguanosine-3'-phosphate
  modified_base 9: mod_base = OTHER; note = 2'-deoxy-2'-fluorouridine-3'-phosphate
  modified_base 10: mod_base = OTHER; note = 2'-deoxy-2'-fluoroguanosine-3'-phosphate
  modified_base 11: mod_base = OTHER; note = 2'-deoxy-2'-fluoroadenosine-3'-phosphate
  modified_base 12: mod_base = OTHER; note = 2'-O-methyluridine-3'-phosphate
  modified_base 13: mod_base = OTHER; note = 2'-O-methylguanosine-3'-phosphate
  modified_base 14: mod_base = OTHER; note = 2'-O-methyluridine-3'-phosphate
  modified_base 15: mod_base = OTHER; note = 2'-O-methylcytidine-3'-phosphate
  modified_base 16: mod_base = OTHER; note = 2'-O-methylcytidine-3'-phosphate
  modified_base 17: mod_base = OTHER; note = 2'-O-methylcytidine-3'-phosphate
  modified_base 18: mod_base = OTHER; note = 2'-O-methyluridine-3'-phosphate
  modified_base 19: mod_base = OTHER; note = 2'-O-methylcytidine-3'-phosphate
  modified_base 20: mod_base = OTHER; note = 2'-O-methyladenosine-3'-phosphate
  modified_base 21: mod_base = OTHER; note = 2'-O-methyladenosine
gactactgtgatgtccctcaa

SEQ ID NO: 3979 - RNA, 21 nt, synthetic construct
  source 1..21: mol_type = other RNA
  modified_base 1: mod_base = OTHER; note = 2'-O-methylcytidine-3'-phosphate
  modified_base 2: mod_base = OTHER; note = 2'-O-methyluridine-3'-phosphate
  modified_base 3: mod_base = OTHER; note = 2'-O-methylguanosine-3'-phosphate
  modified_base 4: mod_base = OTHER; note = 2'-O-methyluridine-3'-phosphate
  modified_base 5: mod_base = OTHER; note = 2'-O-methylguanosine-3'-phosphate
  modified_base 6: mod_base = OTHER; note = 2'-O-methyladenosine-3'-phosphate
  modified_base 7: mod_base = OTHER; note = 2'-deoxy-2'-fluorouridine-3'-phosphate
  modified_base 8: mod_base = OTHER; note = 2'-O-methylguanosine-3'-phosphate
  modified_base 9: mod_base = OTHER; note = 2'-deoxy-2'-fluorouridine-3'-phosphate
  modified_base 10: mod_base = OTHER; note = 2'-deoxy-2'-fluorocytidine-3'-phosphate
  modified_base 11: mod_base = OTHER; note = 2'-deoxy-2'-fluorocytidine-3'-phosphate
  modified_base 12: mod_base = OTHER; note = 2'-O-methylcytidine-3'-phosphate
  modified_base 13: mod_base = OTHER; note = 2'-O-methyluridine-3'-phosphate
  modified_base 14: mod_base = OTHER; note = 2'-O-methylcytidine-3'-phosphate
  modified_base 15: mod_base = OTHER; note = 2'-O-methyladenosine-3'-phosphate
  modified_base 16: mod_base = OTHER; note = 2'-O-methylguanosine-3'-phosphate
  modified_base 17: mod_base = OTHER; note = 2'-O-methyluridine-3'-phosphate
  modified_base 18: mod_base = OTHER; note = 2'-O-methylguanosine-3'-phosphate
  modified_base 19: mod_base = OTHER; note = 2'-O-methyluridine-3'-phosphate
  modified_base 20: mod_base = OTHER; note = 2'-O-methylguanosine-3'-phosphate
  modified_base 21: mod_base = OTHER; note = 2'-O-methyladenosine
ctgtgatgtccctcagtgtga

SEQ ID NO: 3980 - RNA, 21 nt, synthetic construct
  source 1..21: mol_type = other RNA
  modified_base 1: mod_base = OTHER; note = 2'-O-methyladenosine-3'-phosphate
  modified_base 2: mod_base = OTHER; note = 2'-O-methyluridine-3'-phosphate
  modified_base 3: mod_base = OTHER; note = 2'-O-methylguanosine-3'-phosphate
  modified_base 4: mod_base = OTHER; note = 2'-O-methyluridine-3'-phosphate
  modified_base 5: mod_base = OTHER; note = 2'-O-methylcytidine-3'-phosphate
  modified_base 6: mod_base = OTHER; note = 2'-O-methylcytidine-3'-phosphate
  modified_base 7: mod_base = OTHER; note = 2'-deoxy-2'-fluorocytidine-3'-phosphate
  modified_base 8: mod_base = OTHER; note = 2'-O-methyluridine-3'-phosphate
  modified_base 9: mod_base = OTHER; note = 2'-deoxy-2'-fluorocytidine-3'-phosphate
  modified_base 10: mod_base = OTHER; note = 2'-deoxy-2'-fluoroadenosine-3'-phosphate
  modified_base 11: mod_base = OTHER; note = 2'-deoxy-2'-fluoroguanosine-3'-phosphate
  modified_base 12: mod_base = OTHER; note = 2'-O-methyluridine-3'-phosphate
  modified_base 13: mod_base = OTHER; note = 2'-O-methylguanosine-3'-phosphate
  modified_base 14: mod_base = OTHER; note = 2'-O-methyluridine-3'-phosphate
  modified_base 15: mod_base = OTHER; note = 2'-O-methylguanosine-3'-phosphate
  modified_base 16: mod_base = OTHER; note = 2'-O-methylcytidine-3'-phosphate
  modified_base 17: mod_base = OTHER; note = 2'-O-methylguanosine-3'-phosphate
  modified_base 18: mod_base = OTHER; note = 2'-O-methylguanosine-3'-phosphate
  modified_base 19: mod_base = OTHER; note = 2'-O-methylcytidine-3'-phosphate
  modified_base 20: mod_base = OTHER; note = 2'-O-methylcytidine-3'-phosphate
  modified_base 21: mod_base = OTHER; note = 2'-O-methyladenosine
atgtccctcagtgtgcggcca

SEQ ID NO: 3981 - RNA, 21 nt, synthetic construct
  source 1..21: mol_type = other RNA
  modified_base 1: mod_base = OTHER; note = 2'-O-methyladenosine-3'-phosphate
  modified_base 2: mod_base = OTHER; note = 2'-O-methyladenosine-3'-phosphate
  modified_base 3: mod_base = OTHER; note = 2'-O-methylguanosine-3'-phosphate
  modified_base 4: mod_base = OTHER; note = 2'-O-methyladenosine-3'-phosphate
  modified_base 5: mod_base = OTHER; note = 2'-O-methyladenosine-3'-phosphate
  modified_base 6: mod_base = OTHER; note = 2'-O-methyladenosine-3'-phosphate
  modified_base 7: mod_base = OTHER; note = 2'-deoxy-2'-fluorouridine-3'-phosphate
  modified_base 8: mod_base = OTHER; note = 2'-O-methylguanosine-3'-phosphate
  modified_base 9: mod_base = OTHER; note = 2'-deoxy-2'-fluorouridine-3'-phosphate
  modified_base 10: mod_base = OTHER; note = 2'-deoxy-2'-fluorocytidine-3'-phosphate
  modified_base 11: mod_base = OTHER; note = 2'-deoxy-2'-fluorocytidine-3'-phosphate
  modified_base 12: mod_base = OTHER; note = 2'-O-methyluridine-3'-phosphate
  modified_base 13: mod_base = OTHER; note = 2'-O-methylguanosine-3'-phosphate
  modified_base 14: mod_base = OTHER; note = 2'-O-methylguanosine-3'-phosphate
  modified_base 15: mod_base = OTHER; note = 2'-O-methyladenosine-3'-phosphate
  modified_base 16: mod_base = OTHER; note = 2'-O-methyladenosine-3'-phosphate
  modified_base 17: mod_base = OTHER; note = 2'-O-methylguanosine-3'-phosphate
  modified_base 18: mod_base = OTHER; note = 2'-O-methylguanosine-3'-phosphate
  modified_base 19: mod_base = OTHER; note = 2'-O-methylguanosine-3'-phosphate
  modified_base 20: mod_base = OTHER; note = 2'-O-methyluridine-3'-phosphate
  modified_base 21: mod_base = OTHER; note = 2'-O-methyladenosine
aagaaatgtcctggaagggta

SEQ ID NO: 3982 - RNA, 21 nt, synthetic construct
  source 1..21: mol_type = other RNA
  modified_base 1: mod_base = OTHER; note = 2'-O-methylguanosine-3'-phosphate
  modified_base 2: mod_base = OTHER; note = 2'-O-methylcytidine-3'-phosphate
  modified_base 3: mod_base = OTHER; note = 2'-O-methylcytidine-3'-phosphate
  modified_base 4: mod_base = OTHER; note = 2'-O-methylcytidine-3'-phosphate
  modified_base 5: mod_base = OTHER; note = 2'-O-methyluridine-3'-phosphate
  modified_base 6: mod_base = OTHER; note = 2'-O-methylguanosine-3'-phosphate
  modified_base 7: mod_base = OTHER; note = 2'-deoxy-2'-fluoroguanosine-3'-phosphate
  modified_base 8: mod_base = OTHER; note = 2'-O-methylcytidine-3'-phosphate
  modified_base 9: mod_base = OTHER; note = 2'-deoxy-2'-fluoroadenosine-3'-phosphate
  modified_base 10: mod_base = OTHER; note = 2'-deoxy-2'-fluoroadenosine-3'-phosphate
  modified_base 11: mod_base = OTHER; note = 2'-deoxy-2'-fluoroguanosine-3'-phosphate
  modified_base 12: mod_base = OTHER; note = 2'-O-methyluridine-3'-phosphate
  modified_base 13: mod_base = OTHER; note = 2'-O-methylcytidine-3'-phosphate
  modified_base 14: mod_base = OTHER; note = 2'-O-methyladenosine-3'-phosphate
  modified_base 15: mod_base = OTHER; note = 2'-O-methylguanosine-3'-phosphate
  modified_base 16: mod_base = OTHER; note = 2'-O-methyluridine-3'-phosphate
  modified_base 17: mod_base = OTHER; note = 2'-O-methylcytidine-3'-phosphate
  modified_base 18: mod_base = OTHER; note = 2'-O-methyluridine-3'-phosphate
  modified_base 19: mod_base = OTHER; note = 2'-O-methyluridine-3'-phosphate
  modified_base 20: mod_base = OTHER; note = 2'-O-methyladenosine-3'-phosphate
  modified_base 21: mod_base = OTHER; note = 2'-O-methyladenosine
gccctggcaagtcagtcttaa

SEQ ID NO: 3983 - RNA, 21 nt, synthetic construct
  source 1..21: mol_type = other RNA
  modified_base 1: mod_base = OTHER; note = 2'-O-methylcytidine-3'-phosphate
  modified_base 2: mod_base = OTHER; note = 2'-O-methylcytidine-3'-phosphate
  modified_base 3: mod_base = OTHER; note = 2'-O-methyluridine-3'-phosphate
  modified_base 4: mod_base = OTHER; note = 2'-O-methylguanosine-3'-phosphate
  modified_base 5: mod_base = OTHER; note = 2'-O-methylguanosine-3'-phosphate
  modified_base 6: mod_base = OTHER; note = 2'-O-methylcytidine-3'-phosphate
  modified_base 7: mod_base = OTHER; note = 2'-deoxy-2'-fluoroadenosine-3'-phosphate
  modified_base 8: mod_base = OTHER; note = 2'-O-methyladenosine-3'-phosphate
  modified_base 9: mod_base = OTHER; note = 2'-deoxy-2'-fluoroguanosine-3'-phosphate
  modified_base 10: mod_base = OTHER; note = 2'-deoxy-2'-fluorouridine-3'-phosphate
  modified_base 11: mod_base = OTHER; note = 2'-deoxy-2'-fluorocytidine-3'-phosphate
  modified_base 12: mod_base = OTHER; note = 2'-O-methyladenosine-3'-phosphate
  modified_base 13: mod_base = OTHER; note = 2'-O-methylguanosine-3'-phosphate
  modified_base 14: mod_base = OTHER; note = 2'-O-methyluridine-3'-phosphate
  modified_base 15: mod_base = OTHER; note = 2'-O-methylcytidine-3'-phosphate
  modified_base 16: mod_base = OTHER; note = 2'-O-methyluridine-3'-phosphate
  modified_base 17: mod_base = OTHER; note = 2'-O-methyluridine-3'-phosphate
  modified_base 18: mod_base = OTHER; note = 2'-O-methyladenosine-3'-phosphate
  modified_base 19: mod_base = OTHER; note = 2'-O-methylguanosine-3'-phosphate
  modified_base 20: mod_base = OTHER; note = 2'-O-methyladenosine-3'-phosphate
  modified_base 21: mod_base = OTHER; note = 2'-O-methyladenosine
cctggcaagtcagtcttagaa

SEQ ID NO: 3984 - RNA, 21 nt, synthetic construct
  source 1..21: mol_type = other RNA
  modified_base 1: mod_base = OTHER; note = 2'-O-methylcytidine-3'-phosphate
  modified_base 2: mod_base = OTHER; note = 2'-O-methyluridine-3'-phosphate
  modified_base 3: mod_base = OTHER; note = 2'-O-methylguanosine-3'-phosphate
  modified_base 4: mod_base = OTHER; note = 2'-O-methylguanosine-3'-phosphate
  modified_base 5: mod_base = OTHER; note = 2'-O-methylcytidine-3'-phosphate
  modified_base 6: mod_base = OTHER; note = 2'-O-methyladenosine-3'-phosphate
  modified_base 7: mod_base = OTHER; note = 2'-deoxy-2'-fluoroadenosine-3'-phosphate
  modified_base 8: mod_base = OTHER; note = 2'-O-methylguanosine-3'-phosphate
  modified_base 9: mod_base = OTHER; note = 2'-deoxy-2'-fluorouridine-3'-phosphate
  modified_base 10: mod_base = OTHER; note = 2'-deoxy-2'-fluorocytidine-3'-phosphate
  modified_base 11: mod_base = OTHER; note = 2'-deoxy-2'-fluoroadenosine-3'-phosphate
  modified_base 12: mod_base = OTHER; note = 2'-O-methylguanosine-3'-phosphate
  modified_base 13: mod_base = OTHER; note = 2'-O-methyluridine-3'-phosphate
  modified_base 14: mod_base = OTHER; note = 2'-O-methylcytidine-3'-phosphate
  modified_base 15: mod_base = OTHER; note = 2'-O-methyluridine-3'-phosphate
  modified_base 16: mod_base = OTHER; note = 2'-O-methyluridine-3'-phosphate
  modified_base 17: mod_base = OTHER; note = 2'-O-methyladenosine-3'-phosphate
  modified_base 18: mod_base = OTHER; note = 2'-O-methylguanosine-3'-phosphate
  modified_base 19: mod_base = OTHER; note = 2'-O-methyladenosine-3'-phosphate
  modified_base 20: mod_base = OTHER; note = 2'-O-methyladenosine-3'-phosphate
  modified_base 21: mod_base = OTHER; note = 2'-O-methyladenosine
ctggcaagtcagtcttagaaa

SEQ ID NO: 3985 - RNA, 21 nt, synthetic construct
  source 1..21: mol_type = other RNA
  modified_base 1: mod_base = OTHER; note = 2'-O-methyluridine-3'-phosphate
  modified_base 2: mod_base = OTHER; note = 2'-O-methylguanosine-3'-phosphate
  modified_base 3: mod_base = OTHER; note = 2'-O-methylguanosine-3'-phosphate
  modified_base 4: mod_base = OTHER; note = 2'-O-methylcytidine-3'-phosphate
  modified_base 5: mod_base = OTHER; note = 2'-O-methyladenosine-3'-phosphate
  modified_base 6: mod_base = OTHER; note = 2'-O-methyladenosine-3'-phosphate
  modified_base 7: mod_base = OTHER; note = 2'-deoxy-2'-fluoroguanosine-3'-phosphate
  modified_base 8: mod_base = OTHER; note = 2'-O-methyluridine-3'-phosphate
  modified_base 9: mod_base = OTHER; note = 2'-deoxy-2'-fluorocytidine-3'-phosphate
  modified_base 10: mod_base = OTHER; note = 2'-deoxy-2'-fluoroadenosine-3'-phosphate
  modified_base 11: mod_base = OTHER; note = 2'-deoxy-2'-fluoroguanosine-3'-phosphate
  modified_base 12: mod_base = OTHER; note = 2'-O-methyluridine-3'-phosphate
  modified_base 13: mod_base = OTHER; note = 2'-O-methylcytidine-3'-phosphate
  modified_base 14: mod_base = OTHER; note = 2'-O-methyluridine-3'-phosphate
  modified_base 15: mod_base = OTHER; note = 2'-O-methyluridine-3'-phosphate
  modified_base 16: mod_base = OTHER; note = 2'-O-methyladenosine-3'-phosphate
  modified_base 17: mod_base = OTHER; note = 2'-O-methylguanosine-3'-phosphate
  modified_base 18: mod_base = OTHER; note = 2'-O-methyladenosine-3'-phosphate
  modified_base 19: mod_base = OTHER; note = 2'-O-methyladenosine-3'-phosphate
  modified_base 20: mod_base = OTHER; note = 2'-O-methylcytidine-3'-phosphate
  modified_base 21: mod_base = OTHER; note = 2'-O-methyladenosine
tggcaagtcagtcttagaaca

SEQ ID NO: 3986 - RNA, 21 nt, synthetic construct
  source 1..21: mol_type = other RNA
  modified_base 1: mod_base = OTHER; note = 2'-O-methylguanosine-3'-phosphate
  modified_base 2: mod_base = OTHER; note = 2'-O-methylguanosine-3'-phosphate
  modified_base 3: mod_base = OTHER; note = 2'-O-methylcytidine-3'-phosphate
  modified_base 4: mod_base = OTHER; note = 2'-O-methyladenosine-3'-phosphate
  modified_base 5: mod_base = OTHER; note = 2'-O-methyladenosine-3'-phosphate
  modified_base 6: mod_base = OTHER; note = 2'-O-methylguanosine-3'-phosphate
  modified_base 7: mod_base = OTHER; note = 2'-deoxy-2'-fluorouridine-3'-phosphate
  modified_base 8: mod_base = OTHER; note = 2'-O-methylcytidine-3'-phosphate
  modified_base 9: mod_base = OTHER; note = 2'-deoxy-2'-fluoroadenosine-3'-phosphate
  modified_base 10: mod_base = OTHER; note = 2'-deoxy-2'-fluoroguanosine-3'-phosphate
  modified_base 11: mod_base = OTHER; note = 2'-deoxy-2'-fluorouridine-3'-phosphate
  modified_base 12: mod_base = OTHER; note = 2'-O-methylcytidine-3'-phosphate
  modified_base 13: mod_base = OTHER; note = 2'-O-methyluridine-3'-phosphate
  modified_base 14: mod_base = OTHER; note = 2'-O-methyluridine-3'-phosphate
  modified_base 15: mod_base = OTHER; note = 2'-O-methyladenosine-3'-phosphate
  modified_base 16: mod_base = OTHER; note = 2'-O-methylguanosine-3'-phosphate
  modified_base 17: mod_base = OTHER; note = 2'-O-methyladenosine-3'-phosphate
  modified_base 18: mod_base = OTHER; note = 2'-O-methyladenosine-3'-phosphate
  modified_base 19: mod_base = OTHER; note = 2'-O-methylcytidine-3'-phosphate
  modified_base 20: mod_base = OTHER; note = 2'-O-methyladenosine-3'-phosphate
  modified_base 21: mod_base = OTHER; note = 2'-O-methyladenosine
ggcaagtcagtcttagaacaa

SEQ ID NO: 3987 - RNA, 21 nt, synthetic construct
  source 1..21: mol_type = other RNA
  modified_base 1: mod_base = OTHER; note = 2'-O-methylguanosine-3'-phosphate
  modified_base 2: mod_base = OTHER; note = 2'-O-methylcytidine-3'-phosphate
  modified_base 3: mod_base = OTHER; note = 2'-O-methyladenosine-3'-phosphate
  modified_base 4: mod_base = OTHER; note = 2'-O-methyladenosine-3'-phosphate
  modified_base 5: mod_base = OTHER; note = 2'-O-methylguanosine-3'-phosphate
  modified_base 6: mod_base = OTHER; note = 2'-O-methyluridine-3'-phosphate
  modified_base 7: mod_base = OTHER; note = 2'-deoxy-2'-fluorocytidine-3'-phosphate
  modified_base 8: mod_base = OTHER; note = 2'-O-methyladenosine-3'-phosphate
  modified_base 9: mod_base = OTHER; note = 2'-deoxy-2'-fluoroguanosine-3'-phosphate
  modified_base 10: mod_base = OTHER; note = 2'-deoxy-2'-fluorouridine-3'-phosphate
  modified_base 11: mod_base = OTHER; note = 2'-deoxy-2'-fluorocytidine-3'-phosphate
  modified_base 12: mod_base = OTHER; note = 2'-O-methyluridine-3'-phosphate
  modified_base 13: mod_base = OTHER; note = 2'-O-methyluridine-3'-phosphate
  modified_base 14: mod_base = OTHER; note = 2'-O-methyladenosine-3'-phosphate
  modified_base 15: mod_base = OTHER; note = 2'-O-methylguanosine-3'-phosphate
  modified_base 16: mod_base = OTHER; note = 2'-O-methyladenosine-3'-phosphate
  modified_base 17: mod_base = OTHER; note = 2'-O-methyladenosine-3'-phosphate
  modified_base 18: mod_base = OTHER; note = 2'-O-methylcytidine-3'-phosphate
  modified_base 19: mod_base = OTHER; note = 2'-O-methyladenosine-3'-phosphate
  modified_base 20: mod_base = OTHER; note = 2'-O-methyladenosine-3'-phosphate
  modified_base 21: mod_base = OTHER; note = 2'-O-methyladenosine
gcaagtcagtcttagaacaaa

SEQ ID NO: 3988 - RNA, 21 nt, synthetic construct
  source 1..21: mol_type = other RNA
  modified_base 1: mod_base = OTHER; note = 2'-O-methylcytidine-3'-phosphate
  modified_base 2: mod_base = OTHER; note = 2'-O-methyladenosine-3'-phosphate
  modified_base 3: mod_base = OTHER; note = 2'-O-methyladenosine-3'-phosphate
  modified_base 4: mod_base = OTHER; note = 2'-O-methylguanosine-3'-phosphate
  modified_base 5: mod_base = OTHER; note = 2'-O-methyluridine-3'-phosphate
  modified_base 6: mod_base = OTHER; note = 2'-O-methylcytidine-3'-phosphate
  modified_base 7: mod_base = OTHER; note = 2'-deoxy-2'-fluoroadenosine-3'-phosphate
  modified_base 8: mod_base = OTHER; note = 2'-O-methylguanosine-3'-phosphate
  modified_base 9: mod_base = OTHER; note = 2'-deoxy-2'-fluorouridine-3'-phosphate
  modified_base 10: mod_base = OTHER; note = 2'-deoxy-2'-fluorocytidine-3'-phosphate
  modified_base 11: mod_base = OTHER; note = 2'-deoxy-2'-fluorouridine-3'-phosphate
  modified_base 12: mod_base = OTHER; note = 2'-O-methyluridine-3'-phosphate
  modified_base 13: mod_base = OTHER; note = 2'-O-methyladenosine-3'-phosphate
  modified_base 14: mod_base = OTHER; note = 2'-O-methylguanosine-3'-phosphate
  modified_base 15: mod_base = OTHER; note = 2'-O-methyladenosine-3'-phosphate
  modified_base 16: mod_base = OTHER; note = 2'-O-methyladenosine-3'-phosphate
  modified_base 17: mod_base = OTHER; note = 2'-O-methylcytidine-3'-phosphate
  modified_base 18: mod_base = OTHER; note = 2'-O-methyladenosine-3'-phosphate
  modified_base 19: mod_base = OTHER; note = 2'-O-methyladenosine-3'-phosphate
  modified_base 20: mod_base = OTHER; note = 2'-O-methylguanosine-3'-phosphate
  modified_base 21: mod_base = OTHER; note = 2'-O-methyladenosine
caagtcagtcttagaacaaga

SEQ ID NO: 3989 - RNA, 21 nt, synthetic construct
  source 1..21: mol_type = other RNA
  modified_base 1: mod_base = OTHER; note = 2'-O-methyladenosine-3'-phosphate
  modified_base 2: mod_base = OTHER; note = 2'-O-methyladenosine-3'-phosphate
  modified_base 3: mod_base = OTHER; note = 2'-O-methylguanosine-3'-phosphate
  modified_base 4: mod_base = OTHER; note = 2'-O-methyluridine-3'-phosphate
  modified_base 5: mod_base = OTHER; note = 2'-O-methylcytidine-3'-phosphate
  modified_base 6: mod_base = OTHER; note = 2'-O-methyladenosine-3'-phosphate
  modified_base 7: mod_base = OTHER; note = 2'-deoxy-2'-fluoroguanosine-3'-phosphate
  modified_base 8: mod_base = OTHER; note = 2'-O-methyluridine-3'-phosphate
  modified_base 9: mod_base = OTHER; note = 2'-deoxy-2'-fluorocytidine-3'-phosphate
  modified_base 10: mod_base = OTHER; note = 2'-deoxy-2'-fluorouridine-3'-phosphate
  modified_base 11: mod_base = OTHER; note = 2'-deoxy-2'-fluorouridine-3'-phosphate
  modified_base 12: mod_base = OTHER; note = 2'-O-methyladenosine-3'-phosphate
  modified_base 13: mod_base = OTHER; note = 2'-O-methylguanosine-3'-phosphate
  modified_base 14: mod_base = OTHER; note = 2'-O-methyladenosine-3'-phosphate
  modified_base 15: mod_base = OTHER; note = 2'-O-methyladenosine-3'-phosphate
  modified_base 16: mod_base = OTHER; note = 2'-O-methylcytidine-3'-phosphate
  modified_base 17: mod_base = OTHER; note = 2'-O-methyladenosine-3'-phosphate
  modified_base 18: mod_base = OTHER; note = 2'-O-methyladenosine-3'-phosphate
  modified_base 19: mod_base = OTHER; note = 2'-O-methylguanosine-3'-phosphate
  modified_base 20: mod_base = OTHER; note = 2'-O-methylguanosine-3'-phosphate
  modified_base 21: mod_base = OTHER; note = 2'-O-methyladenosine
aagtcagtcttagaacaagga

SEQ ID NO: 3990 - RNA, 21 nt, synthetic construct
  source 1..21: mol_type = other RNA
  modified_base 1: mod_base = OTHER; note = 2'-O-methyladenosine-3'-phosphate
  modified_base 2: mod_base = OTHER; note = 2'-O-methylguanosine-3'-phosphate
  modified_base 3: mod_base = OTHER; note = 2'-O-methyluridine-3'-phosphate
  modified_base 4: mod_base = OTHER; note = 2'-O-methylcytidine-3'-phosphate
  modified_base 5: mod_base = OTHER; note = 2'-O-methyladenosine-3'-phosphate
  modified_base 6: mod_base = OTHER; note = 2'-O-methylguanosine-3'-phosphate
  modified_base 7: mod_base = OTHER; note = 2'-deoxy-2'-fluorouridine-3'-phosphate
  modified_base 8: mod_base = OTHER; note = 2'-O-methylcytidine-3'-phosphate
  modified_base 9: mod_base = OTHER; note = 2'-deoxy-2'-fluorouridine-3'-phosphate
  modified_base 10: mod_base = OTHER; note = 2'-deoxy-2'-fluorouridine-3'-phosphate
  modified_base 11: mod_base = OTHER; note = 2'-deoxy-2'-fluoroadenosine-3'-phosphate
  modified_base 12: mod_base = OTHER; note = 2'-O-methylguanosine-3'-phosphate
  modified_base 13: mod_base = OTHER; note = 2'-O-methyladenosine-3'-phosphate
  modified_base 14: mod_base = OTHER; note = 2'-O-methyladenosine-3'-phosphate
  modified_base 15: mod_base = OTHER; note = 2'-O-methylcytidine-3'-phosphate
  modified_base 16: mod_base = OTHER; note = 2'-O-methyladenosine-3'-phosphate
  modified_base 17: mod_base = OTHER; note = 2'-O-methyladenosine-3'-phosphate
  modified_base 18: mod_base = OTHER; note = 2'-O-methylguanosine-3'-phosphate
  modified_base 19: mod_base = OTHER; note = 2'-O-methylguanosine-3'-phosphate
  modified_base 20: mod_base = OTHER; note = 2'-O-methyluridine-3'-phosphate
  modified_base 21: mod_base = OTHER; note = 2'-O-methyladenosine
agtcagtcttagaacaaggta

SEQ ID NO: 3991 - RNA, 21 nt, synthetic construct
  source 1..21: mol_type = other RNA
  modified_base 1: mod_base = OTHER; note = 2'-O-methylguanosine-3'-phosphate
  modified_base 2: mod_base = OTHER; note = 2'-O-methyluridine-3'-phosphate
  modified_base 3: mod_base = OTHER; note = 2'-O-methylcytidine-3'-phosphate
  modified_base 4: mod_base = OTHER; note = 2'-O-methyladenosine-3'-phosphate
  modified_base 5: mod_base = OTHER; note = 2'-O-methylguanosine-3'-phosphate
  modified_base 6: mod_base = OTHER; note = 2'-O-methyluridine-3'-phosphate
  modified_base 7: mod_base = OTHER; note = 2'-deoxy-2'-fluorocytidine-3'-phosphate
  modified_base 8: mod_base = OTHER; note = 2'-O-methyluridine-3'-phosphate
  modified_base 9: mod_base = OTHER; note = 2'-deoxy-2'-fluorouridine-3'-phosphate
  modified_base 10: mod_base = OTHER; note = 2'-deoxy-2'-fluoroadenosine-3'-phosphate
  modified_base 11: mod_base = OTHER; note = 2'-deoxy-2'-fluoroguanosine-3'-phosphate
  modified_base 12: mod_base = OTHER; note = 2'-O-methyladenosine-3'-phosphate
  modified_base 13: mod_base = OTHER; note = 2'-O-methyladenosine-3'-phosphate
  modified_base 14: mod_base = OTHER; note = 2'-O-methylcytidine-3'-phosphate
  modified_base 15: mod_base = OTHER; note = 2'-O-methyladenosine-3'-phosphate
  modified_base 16: mod_base = OTHER; note = 2'-O-methyladenosine-3'-phosphate
  modified_base 17: mod_base = OTHER; note = 2'-O-methylguanosine-3'-phosphate
  modified_base 18: mod_base = OTHER; note = 2'-O-methylguanosine-3'-phosphate
  modified_base 19: mod_base = OTHER; note = 2'-O-methyluridine-3'-phosphate
  modified_base 20: mod_base = OTHER; note = 2'-O-methyluridine-3'-phosphate
  modified_base 21: mod_base = OTHER; note = 2'-O-methyladenosine
gtcagtcttagaacaaggtta

SEQ ID NO: 3992 - RNA, 21 nt, synthetic construct
  source 1..21: mol_type = other RNA
  modified_base 1: mod_base = OTHER; note = 2'-O-methyluridine-3'-phosphate
  modified_base 2: mod_base = OTHER; note = 2'-O-methylcytidine-3'-phosphate
  modified_base 3: mod_base = OTHER; note = 2'-O-methyladenosine-3'-phosphate
  modified_base 4: mod_base = OTHER; note = 2'-O-methylguanosine-3'-phosphate
  modified_base 5: mod_base = OTHER; note = 2'-O-methyluridine-3'-phosphate
  modified_base 6: mod_base = OTHER; note = 2'-O-methylcytidine-3'-phosphate
  modified_base 7: mod_base = OTHER; note = 2'-deoxy-2'-fluorouridine-3'-phosphate
  modified_base 8: mod_base = OTHER; note = 2'-O-methyluridine-3'-phosphate
  modified_base 9: mod_base = OTHER; note = 2'-deoxy-2'-fluoroadenosine-3'-phosphate
  modified_base 10: mod_base = OTHER; note = 2'-deoxy-2'-fluoroguanosine-3'-phosphate
  modified_base 11: mod_base = OTHER; note = 2'-deoxy-2'-fluoroadenosine-3'-phosphate
  modified_base 12: mod_base = OTHER; note = 2'-O-methyladenosine-3'-phosphate
  modified_base 13: mod_base = OTHER; note = 2'-O-methylcytidine-3'-phosphate
  modified_base 14: mod_base = OTHER; note = 2'-O-methyladenosine-3'-phosphate
  modified_base 15: mod_base = OTHER; note = 2'-O-methyladenosine-3'-phosphate
  modified_base 16: mod_base = OTHER; note = 2'-O-methylguanosine-3'-phosphate
  modified_base 17: mod_base = OTHER; note = 2'-O-methylguanosine-3'-phosphate
  modified_base 18: mod_base = OTHER; note = 2'-O-methyluridine-3'-phosphate
  modified_base 19: mod_base = OTHER; note = 2'-O-methyluridine-3'-phosphate
  modified_base 20: mod_base = OTHER; note = 2'-O-methyluridine-3'-phosphate
  modified_base 21: mod_base = OTHER; note = 2'-O-methyladenosine
tcagtcttagaacaaggttta

SEQ ID NO: 3993 - RNA, 21 nt, synthetic construct
  source 1..21: mol_type = other RNA
  modified_base 1: mod_base = OTHER; note = 2'-O-methylcytidine-3'-phosphate
  modified_base 2: mod_base = OTHER; note = 2'-O-methyladenosine-3'-phosphate
  modified_base 3: mod_base = OTHER; note = 2'-O-methylguanosine-3'-phosphate
  modified_base 4: mod_base = OTHER; note = 2'-O-methyluridine-3'-phosphate
  modified_base 5: mod_base = OTHER; note = 2'-O-methylcytidine-3'-phosphate
  modified_base 6: mod_base = OTHER; note = 2'-O-methyluridine-3'-phosphate
  modified_base 7: mod_base = OTHER; note = 2'-deoxy-2'-fluorouridine-3'-phosphate
  modified_base 8: mod_base = OTHER; note = 2'-O-methyladenosine-3'-phosphate
  modified_base 9: mod_base = OTHER; note = 2'-deoxy-2'-fluoroguanosine-3'-phosphate
  modified_base 10: mod_base = OTHER; note = 2'-deoxy-2'-fluoroadenosine-3'-phosphate
  modified_base 11: mod_base = OTHER; note = 2'-deoxy-2'-fluoroadenosine-3'-phosphate
  modified_base 12: mod_base = OTHER; note = 2'-O-methylcytidine-3'-phosphate
  modified_base 13: mod_base = OTHER; note = 2'-O-methyladenosine-3'-phosphate
  modified_base 14: mod_base = OTHER; note = 2'-O-methyladenosine-3'-phosphate
  modified_base 15: mod_base = OTHER; note = 2'-O-methylguanosine-3'-phosphate
  modified_base 16: mod_base = OTHER; note = 2'-O-methylguanosine-3'-phosphate
  modified_base 17: mod_base = OTHER; note = 2'-O-methyluridine-3'-phosphate
  modified_base 18: mod_base = OTHER; note = 2'-O-methyluridine-3'-phosphate
  modified_base 19: mod_base = OTHER; note = 2'-O-methyluridine-3'-phosphate
  modified_base 20: mod_base = OTHER; note = 2'-O-methylguanosine-3'-phosphate
  modified_base 21: mod_base = OTHER; note = 2'-O-methyladenosine
cagtcttagaacaaggtttga

SEQ ID NO: 3994 - RNA, 21 nt, synthetic construct
  source 1..21: mol_type = other RNA
  modified_base 1: mod_base = OTHER; note = 2'-O-methyladenosine-3'-phosphate
  modified_base 2: mod_base = OTHER; note = 2'-O-methylguanosine-3'-phosphate
  modified_base 3: mod_base = OTHER; note = 2'-O-methyluridine-3'-phosphate
  modified_base 4: mod_base = OTHER; note = 2'-O-methylcytidine-3'-phosphate
  modified_base 5: mod_base = OTHER; note = 2'-O-methyluridine-3'-phosphate
  modified_base 6: mod_base = OTHER; note = 2'-O-methyluridine-3'-phosphate
  modified_base 7: mod_base = OTHER; note = 2'-deoxy-2'-fluoroadenosine-3'-phosphate
  modified_base 8: mod_base = OTHER; note = 2'-O-methylguanosine-3'-phosphate
  modified_base 9: mod_base = OTHER; note = 2'-deoxy-2'-fluoroadenosine-3'-phosphate
  modified_base 10: mod_base = OTHER; note = 2'-deoxy-2'-fluoroadenosine-3'-phosphate
  modified_base 11: mod_base = OTHER; note = 2'-deoxy-2'-fluorocytidine-3'-phosphate
  modified_base 12: mod_base = OTHER; note = 2'-O-methyladenosine-3'-phosphate
  modified_base 13: mod_base = OTHER; note = 2'-O-methyladenosine-3'-phosphate
  modified_base 14: mod_base = OTHER; note = 2'-O-methylguanosine-3'-phosphate
  modified_base 15: mod_base = OTHER; note = 2'-O-methylguanosine-3'-phosphate
  modified_base 16: mod_base = OTHER; note = 2'-O-methyluridine-3'-phosphate
  modified_base 17: mod_base = OTHER; note = 2'-O-methyluridine-3'-phosphate
  modified_base 18: mod_base = OTHER; note = 2'-O-methyluridine-3'-phosphate
  modified_base 19: mod_base = OTHER; note = 2'-O-methylguanosine-3'-phosphate
  modified_base 20: mod_base = OTHER; note = 2'-O-methylguanosine-3'-phosphate
  modified_base 21: mod_base = OTHER; note = 2'-O-methyladenosine
agtcttagaacaaggtttgga

SEQ ID NO: 3995 - RNA, 21 nt, synthetic construct
  source 1..21: mol_type = other RNA
  modified_base 1: mod_base = OTHER; note = 2'-O-methylguanosine-3'-phosphate
  modified_base 2: mod_base = OTHER; note = 2'-O-methyluridine-3'-phosphate
  modified_base 3: mod_base = OTHER; note = 2'-O-methylcytidine-3'-phosphate
  modified_base 4: mod_base = OTHER; note = 2'-O-methyluridine-3'-phosphate
  modified_base 5: mod_base = OTHER; note = 2'-O-methyluridine-3'-phosphate
  modified_base 6: mod_base = OTHER; note = 2'-O-methyladenosine-3'-phosphate
  modified_base 7: mod_base = OTHER; note = 2'-deoxy-2'-fluoroguanosine-3'-phosphate
  modified_base 8: mod_base = OTHER; note = 2'-O-methyladenosine-3'-phosphate
  modified_base 9: mod_base = OTHER; note = 2'-deoxy-2'-fluoroadenosine-3'-phosphate
  modified_base 10: mod_base = OTHER; note = 2'-deoxy-2'-fluorocytidine-3'-phosphate
  modified_base 11: mod_base = OTHER; note = 2'-deoxy-2'-fluoroadenosine-3'-phosphate
  modified_base 12: mod_base = OTHER; note = 2'-O-methyladenosine-3'-phosphate
  modified_base 13: mod_base = OTHER; note = 2'-O-methylguanosine-3'-phosphate
  modified_base 14: mod_base = OTHER; note = 2'-O-methylguanosine-3'-phosphate
  modified_base 15: mod_base = OTHER; note = 2'-O-methyluridine-3'-phosphate
  modified_base 16: mod_base = OTHER; note = 2'-O-methyluridine-3'-phosphate
  modified_base 17: mod_base = OTHER; note = 2'-O-methyluridine-3'-phosphate
  modified_base 18: mod_base = OTHER; note = 2'-O-methylguanosine-3'-phosphate
  modified_base 19: mod_base = OTHER; note = 2'-O-methylguanosine-3'-phosphate
  modified_base 20: mod_base = OTHER; note = 2'-O-methyladenosine-3'-phosphate
  modified_base 21: mod_base = OTHER; note = 2'-O-methyladenosine
gtcttagaacaaggtttggaa

SEQ ID NO: 3996 - RNA, 21 nt, synthetic construct
  source 1..21: mol_type = other RNA
  modified_base 1: mod_base = OTHER; note = 2'-O-methyluridine-3'-phosphate
  modified_base 2: mod_base = OTHER; note = 2'-O-methylcytidine-3'-phosphate
  modified_base 3: mod_base = OTHER; note = 2'-O-methyluridine-3'-phosphate
  modified_base 4: mod_base = OTHER; note = 2'-O-methyluridine-3'-phosphate
  modified_base 5: mod_base = OTHER; note = 2'-O-methyladenosine-3'-phosphate
  modified_base 6: mod_base = OTHER; note = 2'-O-methylguanosine-3'-phosphate
  modified_base 7: mod_base = OTHER; note = 2'-deoxy-2'-fluoroadenosine-3'-phosphate
  modified_base 8: mod_base = OTHER; note = 2'-O-methyladenosine-3'-phosphate
  modified_base 9: mod_base = OTHER; note = 2'-deoxy-2'-fluorocytidine-3'-phosphate
  modified_base 10: mod_base = OTHER; note = 2'-deoxy-2'-fluoroadenosine-3'-phosphate
  modified_base 11: mod_base = OTHER; note = 2'-deoxy-2'-fluoroadenosine-3'-phosphate
  modified_base 12: mod_base = OTHER; note = 2'-O-methylguanosine-3'-phosphate
  modified_base 13: mod_base = OTHER; note = 2'-O-methylguanosine-3'-phosphate
  modified_base 14: mod_base = OTHER; note = 2'-O-methyluridine-3'-phosphate
  modified_base 15: mod_base = OTHER; note = 2'-O-methyluridine-3'-phosphate
  modified_base 16: mod_base = OTHER; note = 2'-O-methyluridine-3'-phosphate
  modified_base 17: mod_base = OTHER; note = 2'-O-methylguanosine-3'-phosphate
  modified_base 18: mod_base = OTHER; note = 2'-O-methylguanosine-3'-phosphate
  modified_base 19: mod_base = OTHER; note = 2'-O-methyladenosine-3'-phosphate
  modified_base 20: mod_base = OTHER; note = 2'-O-methyladenosine-3'-phosphate
  modified_base 21: mod_base = OTHER; note = 2'-O-methyladenosine
tcttagaacaaggtttggaaa

SEQ ID NO: 3997 - RNA, 21 nt, synthetic construct
  source 1..21: mol_type = other RNA
  modified_base 1: mod_base = OTHER; note = 2'-O-methylcytidine-3'-phosphate
  modified_base 2: mod_base = OTHER; note = 2'-O-methyluridine-3'-phosphate
  modified_base 3: mod_base = OTHER; note = 2'-O-methyluridine-3'-phosphate
  modified_base 4: mod_base = OTHER; note = 2'-O-methyladenosine-3'-phosphate
  modified_base 5: mod_base = OTHER; note = 2'-O-methylguanosine-3'-phosphate
  modified_base 6: mod_base = OTHER; note = 2'-O-methyladenosine-3'-phosphate
  modified_base 7: mod_base = OTHER; note = 2'-deoxy-2'-fluoroadenosine-3'-phosphate
  modified_base 8: mod_base = OTHER; note = 2'-O-methylcytidine-3'-phosphate
  modified_base 9: mod_base = OTHER; note = 2'-deoxy-2'-fluoroadenosine-3'-phosphate
  modified_base 10: mod_base = OTHER; note = 2'-deoxy-2'-fluoroadenosine-3'-phosphate
  modified_base 11: mod_base = OTHER; note = 2'-deoxy-2'-fluoroguanosine-3'-phosphate
  modified_base 12: mod_base = OTHER; note = 2'-O-methylguanosine-3'-phosphate
  modified_base 13: mod_base = OTHER; note = 2'-O-methyluridine-3'-phosphate
  modified_base 14: mod_base = OTHER; note = 2'-O-methyluridine-3'-phosphate
  modified_base 15: mod_base = OTHER; note = 2'-O-methyluridine-3'-phosphate
  modified_base 16: mod_base = OTHER; note = 2'-O-methylguanosine-3'-phosphate
  modified_base 17: mod_base = OTHER; note = 2'-O-methylguanosine-3'-phosphate
  modified_base 18: mod_base = OTHER; note = 2'-O-methyladenosine-3'-phosphate
  modified_base 19: mod_base = OTHER; note = 2'-O-methyladenosine-3'-phosphate
  modified_base 20: mod_base = OTHER; note = 2'-O-methyluridine-3'-phosphate
  modified_base 21: mod_base = OTHER; note = 2'-O-methyladenosine
cttagaacaaggtttggaata

SEQ ID NO: 3998 - RNA, 21 nt, synthetic construct
  source 1..21: mol_type = other RNA
  modified_base 1: mod_base = OTHER; note = 2'-O-methyluridine-3'-phosphate
  modified_base 2: mod_base = OTHER; note = 2'-O-methyluridine-3'-phosphate
  modified_base 3: mod_base = OTHER; note = 2'-O-methyladenosine-3'-phosphate
  modified_base 4: mod_base = OTHER; note = 2'-O-methylguanosine-3'-phosphate
  modified_base 5: mod_base = OTHER; note = 2'-O-methyladenosine-3'-phosphate
  modified_base 6: mod_base = OTHER; note = 2'-O-methyladenosine-3'-phosphate
  modified_base 7: mod_base = OTHER; note = 2'-deoxy-2'-fluorocytidine-3'-phosphate
  modified_base 8: mod_base = OTHER; note = 2'-O-methyladenosine-3'-phosphate
  modified_base 9: mod_base = OTHER; note = 2'-deoxy-2'-fluoroadenosine-3'-phosphate
  modified_base 10: mod_base = OTHER; note = 2'-deoxy-2'-fluoroguanosine-3'-phosphate
  modified_base 11: mod_base = OTHER; note = 2'-deoxy-2'-fluoroguanosine-3'-phosphate
  modified_base 12: mod_base = OTHER; note = 2'-O-methyluridine-3'-phosphate
  modified_base 13: mod_base = OTHER; note = 2'-O-methyluridine-3'-phosphate
  modified_base 14: mod_base = OTHER; note = 2'-O-methyluridine-3'-phosphate
  modified_base 15: mod_base = OTHER; note = 2'-O-methylguanosine-3'-phosphate
  modified_base 16: mod_base = OTHER; note = 2'-O-methylguanosine-3'-phosphate
  modified_base 17: mod_base = OTHER; note = 2'-O-methyladenosine-3'-phosphate
  modified_base 18: mod_base = OTHER; note = 2'-O-methyladenosine-3'-phosphate
  modified_base 19: mod_base = OTHER; note = 2'-O-methyluridine-3'-phosphate
  modified_base 20: mod_base = OTHER; note = 2'-O-methylguanosine-3'-phosphate
  modified_base 21: mod_base = OTHER; note = 2'-O-methyladenosine
ttagaacaaggtttggaatga

SEQ ID NO: 3999 - RNA, 21 nt, synthetic construct
  source 1..21: mol_type = other RNA
  modified_base 1: mod_base = OTHER; note = 2'-O-methyluridine-3'-phosphate
  modified_base 2: mod_base = OTHER; note = 2'-O-methyladenosine-3'-phosphate
  modified_base 3: mod_base = OTHER; note = 2'-O-methylguanosine-3'-phosphate
  modified_base 4: mod_base = OTHER; note = 2'-O-methyladenosine-3'-phosphate
  modified_base 5: mod_base = OTHER; note = 2'-O-methyladenosine-3'-phosphate
  modified_base 6: mod_base = OTHER; note = 2'-O-methylcytidine-3'-phosphate
  modified_base 7: mod_base = OTHER; note = 2'-deoxy-2'-fluoroadenosine-3'-phosphate
  modified_base 8: mod_base = OTHER; note = 2'-O-methyladenosine-3'-phosphate
  modified_base 9: mod_base = OTHER; note = 2'-deoxy-2'-fluoroguanosine-3'-phosphate
  modified_base 10: mod_base = OTHER; note = 2'-deoxy-2'-fluoroguanosine-3'-phosphate
  modified_base 11: mod_base = OTHER; note = 2'-deoxy-2'-fluorouridine-3'-phosphate
  modified_base 12: mod_base = OTHER; note = 2'-O-methyluridine-3'-phosphate
  modified_base 13: mod_base = OTHER; note = 2'-O-methyluridine-3'-phosphate
  modified_base 14: mod_base = OTHER; note = 2'-O-methylguanosine-3'-phosphate
  modified_base 15: mod_base = OTHER; note = 2'-O-methylguanosine-3'-phosphate
  modified_base 16: mod_base = OTHER; note = 2'-O-methyladenosine-3'-phosphate
  modified_base 17: mod_base = OTHER; note = 2'-O-methyladenosine-3'-phosphate
  modified_base 18: mod_base = OTHER; note = 2'-O-methyluridine-3'-phosphate
  modified_base 19: mod_base = OTHER; note = 2'-O-methylguanosine-3'-phosphate
  modified_base 20: mod_base = OTHER; note = 2'-O-methylcytidine-3'-phosphate
  modified_base 21: mod_base = OTHER; note = 2'-O-methyladenosine
tagaacaaggtttggaatgca

SEQ ID NO: 4000 - RNA, 21 nt, synthetic construct
  source 1..21: mol_type = other RNA
  modified_base 1: mod_base = OTHER; note = 2'-O-methyladenosine-3'-phosphate
  modified_base 2: mod_base = OTHER; note = 2'-O-methylguanosine-3'-phosphate
  modified_base 3: mod_base = OTHER; note = 2'-O-methyladenosine-3'-phosphate
  modified_base 4: mod_base = OTHER; note = 2'-O-methyladenosine-3'-phosphate
  modified_base 5: mod_base = OTHER; note = 2'-O-methylcytidine-3'-phosphate
  modified_base 6: mod_base = OTHER; note = 2'-O-methyladenosine-3'-phosphate
  modified_base 7: mod_base = OTHER; note = 2'-deoxy-2'-fluoroadenosine-3'-phosphate
  modified_base 8: mod_base = OTHER; note = 2'-O-methylguanosine-3'-phosphate
  modified_base 9: mod_base = OTHER; note = 2'-deoxy-2'-fluoroguanosine-3'-phosphate
  modified_base 10: mod_base = OTHER; note = 2'-deoxy-2'-fluorouridine-3'-phosphate
  modified_base 11: mod_base = OTHER; note = 2'-deoxy-2'-fluorouridine-3'-phosphate
  modified_base 12: mod_base = OTHER; note = 2'-O-methyluridine-3'-phosphate
  modified_base 13: mod_base = OTHER; note = 2'-O-methylguanosine-3'-phosphate
  modified_base 14: mod_base = OTHER; note = 2'-O-methylguanosine-3'-phosphate
  modified_base 15: mod_base = OTHER; note = 2'-O-methyladenosine-3'-phosphate
  modified_base 16: mod_base = OTHER; note = 2'-O-methyladenosine-3'-phosphate
  modified_base 17: mod_base = OTHER; note = 2'-O-methyluridine-3'-phosphate
  modified_base 18: mod_base = OTHER; note = 2'-O-methylguanosine-3'-phosphate
  modified_base 19: mod_base = OTHER; note = 2'-O-methylcytidine-3'-phosphate
  modified_base 20: mod_base = OTHER; note = 2'-O-methyladenosine-3'-phosphate
  modified_base 21: mod_base = OTHER; note = 2'-O-methyladenosine
agaacaaggtttggaatgcaa

SEQ ID NO: 4001 - RNA, 21 nt, synthetic construct
  source 1..21: mol_type = other RNA
  modified_base 1: mod_base = OTHER; note = 2'-O-methylguanosine-3'-phosphate
  modified_base 2: mod_base = OTHER; note = 2'-O-methyladenosine-3'-phosphate
  modified_base 3: mod_base = OTHER; note = 2'-O-methyladenosine-3'-phosphate
  modified_base 4: mod_base = OTHER; note = 2'-O-methylcytidine-3'-phosphate
  modified_base 5: mod_base = OTHER; note = 2'-O-methyladenosine-3'-phosphate
  modified_base 6: mod_base = OTHER; note = 2'-O-methyladenosine-3'-phosphate
  modified_base 7: mod_base = OTHER; note = 2'-deoxy-2'-fluoroguanosine-3'-phosphate
  modified_base 8: mod_base = OTHER; note = 2'-O-methylguanosine-3'-phosphate
  modified_base 9: mod_base = OTHER; note = 2'-deoxy-2'-fluorouridine-3'-phosphate
  modified_base 10: mod_base = OTHER; note = 2'-deoxy-2'-fluorouridine-3'-phosphate
  modified_base 11: mod_base = OTHER; note = 2'-deoxy-2'-fluorouridine-3'-phosphate
  modified_base 12: mod_base = OTHER; note = 2'-O-methylguanosine-3'-phosphate
  modified_base 13: mod_base = OTHER; note = 2'-O-methylguanosine-3'-phosphate
  modified_base 14: mod_base = OTHER; note = 2'-O-methyladenosine-3'-phosphate
  modified_base 15: mod_base = OTHER; note = 2'-O-methyladenosine-3'-phosphate
  modified_base 16: mod_base = OTHER; note = 2'-O-methyluridine-3'-phosphate
  modified_base 17: mod_base = OTHER; note = 2'-O-methylguanosine-3'-phosphate
  modified_base 18: mod_base = OTHER; note = 2'-O-methylcytidine-3'-phosphate
  modified_base 19: mod_base = OTHER; note = 2'-O-methyladenosine-3'-phosphate
  modified_base 20: mod_base = OTHER; note = 2'-O-methylcytidine-3'-phosphate
  modified_base 21: mod_base = OTHER; note = 2'-O-methyladenosine
gaacaaggtttggaatgcaca

SEQ ID NO: 4002 - RNA, 21 nt, synthetic construct
  source 1..21: mol_type = other RNA
  modified_base 1: mod_base = OTHER; note = 2'-O-methyladenosine-3'-phosphate
  modified_base 2: mod_base = OTHER; note = 2'-O-methyladenosine-3'-phosphate
  modified_base 3: mod_base = OTHER; note = 2'-O-methylcytidine-3'-phosphate
  modified_base 4: mod_base = OTHER; note = 2'-O-methyladenosine-3'-phosphate
  modified_base 5: mod_base = OTHER; note = 2'-O-methyladenosine-3'-phosphate
  modified_base 6: mod_base = OTHER; note = 2'-O-methylguanosine-3'-phosphate
  modified_base 7: mod_base = OTHER; note = 2'-deoxy-2'-fluoroguanosine-3'-phosphate
  modified_base 8: mod_base = OTHER; note = 2'-O-methyluridine-3'-phosphate
  modified_base 9: mod_base = OTHER; note = 2'-deoxy-2'-fluorouridine-3'-phosphate
  modified_base 10: mod_base = OTHER; note = 2'-deoxy-2'-fluorouridine-3'-phosphate
  modified_base 11: mod_base = OTHER; note = 2'-deoxy-2'-fluoroguanosine-3'-phosphate
  modified_base 12: mod_base = OTHER; note = 2'-O-methylguanosine-3'-phosphate
  modified_base 13: mod_base = OTHER; note = 2'-O-methyladenosine-3'-phosphate
  modified_base 14: mod_base = OTHER; note = 2'-O-methyladenosine-3'-phosphate
  modified_base 15: mod_base = OTHER; note = 2'-O-methyluridine-3'-phosphate
  modified_base 16: mod_base = OTHER; note = 2'-O-methylguanosine-3'-phosphate
  modified_base 17: mod_base = OTHER; note = 2'-O-methylcytidine-3'-phosphate
  modified_base 18: mod_base = OTHER; note = 2'-O-methyladenosine-3'-phosphate
  modified_base 19: mod_base = OTHER; note = 2'-O-methylcytidine-3'-phosphate
  modified_base 20: mod_base = OTHER; note = 2'-O-methyluridine-3'-phosphate
  modified_base 21: mod_base = OTHER; note = 2'-O-methyladenosine
aacaaggtttggaatgcacta

SEQ ID NO: 4003 - RNA, 21 nt, synthetic construct
  source 1..21: mol_type = other RNA
  modified_base 1: mod_base = OTHER; note = 2'-O-methyladenosine-3'-phosphate
  modified_base 2: mod_base = OTHER; note = 2'-O-methylcytidine-3'-phosphate
  modified_base 3: mod_base = OTHER; note = 2'-O-methyladenosine-3'-phosphate
  modified_base 4: mod_base = OTHER; note = 2'-O-methyladenosine-3'-phosphate
  modified_base 5: mod_base = OTHER; note = 2'-O-methylguanosine-3'-phosphate
  modified_base 6: mod_base = OTHER; note = 2'-O-methylguanosine-3'-phosphate
  modified_base 7: mod_base = OTHER; note = 2'-deoxy-2'-fluorouridine-3'-phosphate
  modified_base 8: mod_base = OTHER; note = 2'-O-methyluridine-3'-phosphate
  modified_base 9: mod_base = OTHER; note = 2'-deoxy-2'-fluorouridine-3'-phosphate
  modified_base 10: mod_base = OTHER; note = 2'-deoxy-2'-fluoroguanosine-3'-phosphate
  modified_base 11: mod_base = OTHER; note = 2'-deoxy-2'-fluoroguanosine-3'-phosphate
  modified_base 12: mod_base = OTHER; note = 2'-O-methyladenosine-3'-phosphate
  modified_base 13: mod_base = OTHER; note = 2'-O-methyladenosine-3'-phosphate
  modified_base 14: mod_base = OTHER; note = 2'-O-methyluridine-3'-phosphate
  modified_base 15: mod_base = OTHER; note = 2'-O-methylguanosine-3'-phosphate
  modified_base 16: mod_base = OTHER; note = 2'-O-methylcytidine-3'-phosphate
  modified_base 17: mod_base = OTHER; note = 2'-O-methyladenosine-3'-phosphate
  modified_base 18: mod_base = OTHER; note = 2'-O-methylcytidine-3'-phosphate
  modified_base 19: mod_base = OTHER; note = 2'-O-methyluridine-3'-phosphate
  modified_base 20: mod_base = OTHER; note = 2'-O-methyluridine-3'-phosphate
  modified_base 21: mod_base = OTHER; note = 2'-O-methyladenosine
acaaggtttggaatgcactta

SEQ ID NO: 4004 - RNA, 21 nt, synthetic construct
  source 1..21: mol_type = other RNA
  modified_base 1: mod_base = OTHER; note = 2'-O-methylcytidine-3'-phosphate
  modified_base 2: mod_base = OTHER; note = 2'-O-methyladenosine-3'-phosphate
  modified_base 3: mod_base = OTHER; note = 2'-O-methyladenosine-3'-phosphate
  modified_base 4: mod_base = OTHER; note = 2'-O-methylguanosine-3'-phosphate
  modified_base 5: mod_base = OTHER; note = 2'-O-methylguanosine-3'-phosphate
  modified_base 6: mod_base = OTHER; note = 2'-O-methyluridine-3'-phosphate
  modified_base 7: mod_base = OTHER; note = 2'-deoxy-2'-fluorouridine-3'-phosphate
  modified_base 8: mod_base = OTHER; note = 2'-O-methyluridine-3'-phosphate
  modified_base 9: mod_base = OTHER; note = 2'-deoxy-2'-fluoroguanosine-3'-phosphate
  modified_base 10: mod_base = OTHER; note = 2'-deoxy-2'-fluoroguanosine-3'-phosphate
  modified_base 11: mod_base = OTHER; note = 2'-deoxy-2'-fluoroadenosine-3'-phosphate
  modified_base 12: mod_base = OTHER; note = 2'-O-methyladenosine-3'-phosphate
  modified_base 13: mod_base = OTHER; note = 2'-O-methyluridine-3'-phosphate
  modified_base 14: mod_base = OTHER; note = 2'-O-methylguanosine-3'-phosphate
  modified_base 15: mod_base = OTHER; note = 2'-O-methylcytidine-3'-phosphate
  modified_base 16: mod_base = OTHER; note = 2'-O-methyladenosine-3'-phosphate
  modified_base 17: mod_base = OTHER; note = 2'-O-methylcytidine-3'-phosphate
  modified_base 18: mod_base = OTHER; note = 2'-O-methyluridine-3'-phosphate
  modified_base 19: mod_base = OTHER; note = 2'-O-methyluridine-3'-phosphate
  modified_base 20: mod_base = OTHER; note = 2'-O-methylcytidine-3'-phosphate
  modified_base 21: mod_base = OTHER; note = 2'-O-methyladenosine
caaggtttggaatgcacttca

SEQ ID NO: 4005 - RNA, 21 nt, synthetic construct
  source 1..21: mol_type = other RNA
  modified_base 1: mod_base = OTHER; note = 2'-O-methyladenosine-3'-phosphate
  modified_base 2: mod_base = OTHER; note = 2'-O-methyladenosine-3'-phosphate
  modified_base 3: mod_base = OTHER; note = 2'-O-methylguanosine-3'-phosphate
  modified_base 4: mod_base = OTHER; note = 2'-O-methylguanosine-3'-phosphate
  modified_base 5: mod_base = OTHER; note = 2'-O-methyluridine-3'-phosphate
  modified_base 6: mod_base = OTHER; note = 2'-O-methyluridine-3'-phosphate
  modified_base 7: mod_base = OTHER; note = 2'-deoxy-2'-fluorouridine-3'-phosphate
  modified_base 8: mod_base = OTHER; note = 2'-O-methylguanosine-3'-phosphate
  modified_base 9: mod_base = OTHER; note = 2'-deoxy-2'-fluoroguanosine-3'-phosphate
  modified_base 10: mod_base = OTHER; note = 2'-deoxy-2'-fluoroadenosine-3'-phosphate
  modified_base 11: mod_base = OTHER; note = 2'-deoxy-2'-fluoroadenosine-3'-phosphate
  modified_base 12: mod_base = OTHER; note = 2'-O-methyluridine-3'-phosphate
  modified_base 13: mod_base = OTHER; note = 2'-O-methylguanosine-3'-phosphate
  modified_base 14: mod_base = OTHER; note = 2'-O-methylcytidine-3'-phosphate
  modified_base 15: mod_base = OTHER; note = 2'-O-methyladenosine-3'-phosphate
  modified_base 16: mod_base = OTHER; note = 2'-O-methylcytidine-3'-phosphate
  modified_base 17: mod_base = OTHER; note = 2'-O-methyluridine-3'-phosphate
  modified_base 18: mod_base = OTHER; note = 2'-O-methyluridine-3'-phosphate
  modified_base 19: mod_base = OTHER; note = 2'-O-methylcytidine-3'-phosphate
  modified_base 20: mod_base = OTHER; note = 2'-O-methyluridine-3'-phosphate
  modified_base 21: mod_base = OTHER; note = 2'-O-methyladenosine
aaggtttggaatgcacttcta

SEQ ID NO: 4006 - RNA, 21 nt, synthetic construct
  source 1..21: mol_type = other RNA
  modified_base 1: mod_base = OTHER; note = 2'-O-methyladenosine-3'-phosphate
  modified_base 2: mod_base = OTHER; note = 2'-O-methylguanosine-3'-phosphate
  modified_base 3: mod_base = OTHER; note = 2'-O-methylguanosine-3'-phosphate
  modified_base 4: mod_base = OTHER; note = 2'-O-methyluridine-3'-phosphate
  modified_base 5: mod_base = OTHER; note = 2'-O-methyluridine-3'-phosphate
  modified_base 6: mod_base = OTHER; note = 2'-O-methyluridine-3'-phosphate
  modified_base 7: mod_base = OTHER; note = 2'-deoxy-2'-fluoroguanosine-3'-phosphate
  modified_base 8: mod_base = OTHER; note = 2'-O-methylguanosine-3'-phosphate
  modified_base 9: mod_base = OTHER; note = 2'-deoxy-2'-fluoroadenosine-3'-phosphate
  modified_base 10: mod_base = OTHER; note = 2'-deoxy-2'-fluoroadenosine-3'-phosphate
  modified_base 11: mod_base = OTHER; note = 2'-deoxy-2'-fluorouridine-3'-phosphate
  modified_base 12: mod_base = OTHER; note = 2'-O-methylguanosine-3'-phosphate
  modified_base 13: mod_base = OTHER; note = 2'-O-methylcytidine-3'-phosphate
  modified_base 14: mod_base = OTHER; note = 2'-O-methyladenosine-3'-phosphate
  modified_base 15: mod_base = OTHER; note = 2'-O-methylcytidine-3'-phosphate
  modified_base 16: mod_base = OTHER; note = 2'-O-methyluridine-3'-phosphate
  modified_base 17: mod_base = OTHER; note = 2'-O-methyluridine-3'-phosphate
  modified_base 18: mod_base = OTHER; note = 2'-O-methylcytidine-3'-phosphate
  modified_base 19: mod_base = OTHER; note = 2'-O-methyluridine-3'-phosphate
  modified_base 20: mod_base = OTHER; note = 2'-O-methylguanosine-3'-phosphate
  modified_base 21: mod_base = OTHER; note = 2'-O-methyladenosine
aggtttggaatgcacttctga

SEQ ID NO: 4007 - RNA, 21 nt, synthetic construct
  source 1..21: mol_type = other RNA
  modified_base 1: mod_base = OTHER; note = 2'-O-methylguanosine-3'-phosphate
  modified_base 2: mod_base = OTHER; note = 2'-O-methylguanosine-3'-phosphate
  modified_base 3: mod_base = OTHER; note = 2'-O-methyluridine-3'-phosphate
  modified_base 4: mod_base = OTHER; note = 2'-O-methyluridine-3'-phosphate
  modified_base 5: mod_base = OTHER; note = 2'-O-methyluridine-3'-phosphate
  modified_base 6: mod_base = OTHER; note = 2'-O-methylguanosine-3'-phosphate
  modified_base 7: mod_base = OTHER; note = 2'-deoxy-2'-fluoroguanosine-3'-phosphate
  modified_base 8: mod_base = OTHER; note = 2'-O-methyladenosine-3'-phosphate
  modified_base 9: mod_base = OTHER; note = 2'-deoxy-2'-fluoroadenosine-3'-phosphate
  modified_base 10: mod_base = OTHER; note = 2'-deoxy-2'-fluorouridine-3'-phosphate
  modified_base 11: mod_base = OTHER; note = 2'-deoxy-2'-fluoroguanosine-3'-phosphate
  modified_base 12: mod_base = OTHER; note = 2'-O-methylcytidine-3'-phosphate
  modified_base 13: mod_base = OTHER; note = 2'-O-methyladenosine-3'-phosphate
  modified_base 14: mod_base = OTHER; note = 2'-O-methylcytidine-3'-phosphate
  modified_base 15: mod_base = OTHER; note = 2'-O-methyluridine-3'-phosphate
  modified_base 16: mod_base = OTHER; note = 2'-O-methyluridine-3'-phosphate
  modified_base 17: mod_base = OTHER; note = 2'-O-methylcytidine-3'-phosphate
  modified_base 18: mod_base = OTHER; note = 2'-O-methyluridine-3'-phosphate
  modified_base 19: mod_base = OTHER; note = 2'-O-methylguanosine-3'-phosphate
  modified_base 20: mod_base = OTHER; note = 2'-O-methyluridine-3'-phosphate
  modified_base 21: mod_base = OTHER; note = 2'-O-methyladenosine
ggtttggaatgcacttctgta

SEQ ID NO: 4008 - RNA, 21 nt, synthetic construct
  source 1..21: mol_type = other RNA
  modified_base 1: mod_base = OTHER; note = 2'-O-methyluridine-3'-phosphate
  modified_base 2: mod_base = OTHER; note = 2'-O-methyluridine-3'-phosphate
  modified_base 3: mod_base = OTHER; note = 2'-O-methylguanosine-3'-phosphate
  modified_base 4: mod_base = OTHER; note = 2'-O-methylguanosine-3'-phosphate
  modified_base 5: mod_base = OTHER; note = 2'-O-methyladenosine-3'-phosphate
  modified_base 6: mod_base = OTHER; note = 2'-O-methyladenosine-3'-phosphate
  modified_base 7: mod_base = OTHER; note = 2'-deoxy-2'-fluorouridine-3'-phosphate
  modified_base 8: mod_base = OTHER; note = 2'-O-methylguanosine-3'-phosphate
  modified_base 9: mod_base = OTHER; note = 2'-deoxy-2'-fluorocytidine-3'-phosphate
  modified_base 10: mod_base = OTHER; note = 2'-deoxy-2'-fluoroadenosine-3'-phosphate
  modified_base 11: mod_base = OTHER; note = 2'-deoxy-2'-fluorocytidine-3'-phosphate
  modified_base 12: mod_base = OTHER; note = 2'-O-methyluridine-3'-phosphate
  modified_base 13: mod_base = OTHER; note = 2'-O-methyluridine-3'-phosphate
  modified_base 14: mod_base = OTHER; note = 2'-O-methylcytidine-3'-phosphate
  modified_base 15: mod_base = OTHER; note = 2'-O-methyluridine-3'-phosphate
  modified_base 16: mod_base = OTHER; note = 2'-O-methylguanosine-3'-phosphate
  modified_base 17: mod_base = OTHER; note = 2'-O-methyluridine-3'-phosphate
  modified_base 18: mod_base = OTHER; note = 2'-O-methylguanosine-3'-phosphate
  modified_base 19: mod_base = OTHER; note = 2'-O-methylguanosine-3'-phosphate
  modified_base 20: mod_base = OTHER; note = 2'-O-methyladenosine-3'-phosphate
  modified_base 21: mod_base = OTHER; note = 2'-O-methyladenosine
ttggaatgcacttctgtggaa

SEQ ID NO: 4009 - RNA, 21 nt, synthetic construct
  source 1..21: mol_type = other RNA
  modified_base 1: mod_base = OTHER; note = 2'-O-methyluridine-3'-phosphate
  modified_base 2: mod_base = OTHER; note = 2'-O-methylguanosine-3'-phosphate
  modified_base 3: mod_base = OTHER; note = 2'-O-methylguanosine-3'-phosphate
  modified_base 4: mod_base = OTHER; note = 2'-O-methyladenosine-3'-phosphate
  modified_base 5: mod_base = OTHER; note = 2'-O-methyladenosine-3'-phosphate
  modified_base 6: mod_base = OTHER; note = 2'-O-methyluridine-3'-phosphate
  modified_base 7: mod_base = OTHER; note = 2'-deoxy-2'-fluoroguanosine-3'-phosphate
  modified_base 8: mod_base = OTHER; note = 2'-O-methylcytidine-3'-phosphate
  modified_base 9: mod_base = OTHER; note = 2'-deoxy-2'-fluoroadenosine-3'-phosphate
  modified_base 10: mod_base = OTHER; note = 2'-deoxy-2'-fluorocytidine-3'-phosphate
  modified_base 11: mod_base = OTHER; note = 2'-deoxy-2'-fluorouridine-3'-phosphate
  modified_base 12: mod_base = OTHER; note = 2'-O-methyluridine-3'-phosphate
  modified_base 13: mod_base = OTHER; note = 2'-O-methylcytidine-3'-phosphate
  modified_base 14: mod_base = OTHER; note = 2'-O-methyluridine-3'-phosphate
  modified_base 15: mod_base = OTHER; note = 2'-O-methylguanosine-3'-phosphate
  modified_base 16: mod_base = OTHER; note = 2'-O-methyluridine-3'-phosphate
  modified_base 17: mod_base = OTHER; note = 2'-O-methylguanosine-3'-phosphate
  modified_base 18: mod_base = OTHER; note = 2'-O-methylguanosine-3'-phosphate
  modified_base 19: mod_base = OTHER; note = 2'-O-methyladenosine-3'-phosphate
  modified_base 20: mod_base = OTHER; note = 2'-O-methylguanosine-3'-phosphate
  modified_base 21: mod_base = OTHER; note = 2'-O-methyladenosine
tggaatgcacttctgtggaga

SEQ ID NO: 4010 - RNA, 21 nt, synthetic construct
  source 1..21: mol_type = other RNA
  modified_base 1: mod_base = OTHER; note = 2'-O-methylguanosine-3'-phosphate
  modified_base 2: mod_base = OTHER; note = 2'-O-methyladenosine-3'-phosphate
  modified_base 3: mod_base = OTHER; note = 2'-O-methyladenosine-3'-phosphate
  modified_base 4: mod_base = OTHER; note = 2'-O-methyluridine-3'-phosphate
  modified_base 5: mod_base = OTHER; note = 2'-O-methylguanosine-3'-phosphate
  modified_base 6: mod_base = OTHER; note = 2'-O-methylcytidine-3'-phosphate
  modified_base 7: mod_base = OTHER; note = 2'-deoxy-2'-fluoroadenosine-3'-phosphate
  modified_base 8: mod_base = OTHER; note = 2'-O-methylcytidine-3'-phosphate
  modified_base 9: mod_base = OTHER; note = 2'-deoxy-2'-fluorouridine-3'-phosphate
  modified_base 10: mod_base = OTHER; note = 2'-deoxy-2'-fluorouridine-3'-phosphate
  modified_base 11: mod_base = OTHER; note = 2'-deoxy-2'-fluorocytidine-3'-phosphate
  modified_base 12: mod_base = OTHER; note = 2'-O-methyluridine-3'-phosphate
  modified_base 13: mod_base = OTHER; note = 2'-O-methylguanosine-3'-phosphate
  modified_base 14: mod_base = OTHER; note = 2'-O-methyluridine-3'-phosphate
  modified_base 15: mod_base = OTHER; note = 2'-O-methylguanosine-3'-phosphate
  modified_base 16: mod_base = OTHER; note = 2'-O-methylguanosine-3'-phosphate
  modified_base 17: mod_base = OTHER; note = 2'-O-methyladenosine-3'-phosphate
  modified_base 18: mod_base = OTHER; note = 2'-O-methylguanosine-3'-phosphate
  modified_base 19: mod_base = OTHER; note = 2'-O-methylguanosine-3'-phosphate
  modified_base 20: mod_base = OTHER; note = 2'-O-methylcytidine-3'-phosphate
  modified_base 21: mod_base = OTHER; note = 2'-O-methyladenosine
gaatgcacttctgtggaggca

SEQ ID NO: 4011 - RNA, 21 nt, synthetic construct
  source 1..21: mol_type = other RNA
  modified_base 1: mod_base = OTHER; note = 2'-O-methylcytidine-3'-phosphate
  modified_base 2: mod_base = OTHER; note = 2'-O-methyluridine-3'-phosphate
  modified_base 3: mod_base = OTHER; note = 2'-O-methylguanosine-3'-phosphate
  modified_base 4: mod_base = OTHER; note = 2'-O-methyluridine-3'-phosphate
  modified_base 5: mod_base = OTHER; note = 2'-O-methylguanosine-3'-phosphate
  modified_base 6: mod_base = OTHER; note = 2'-O-methylguanosine-3'-phosphate
  modified_base 7: mod_base = OTHER; note = 2'-deoxy-2'-fluoroadenosine-3'-phosphate
  modified_base 8: mod_base = OTHER; note = 2'-O-methylguanosine-3'-phosphate
  modified_base 9: mod_base = OTHER; note = 2'-deoxy-2'-fluoroguanosine-3'-phosphate
  modified_base 10: mod_base = OTHER; note = 2'-deoxy-2'-fluorocytidine-3'-phosphate
  modified_base 11: mod_base = OTHER; note = 2'-deoxy-2'-fluoroadenosine-3'-phosphate
  modified_base 12: mod_base = OTHER; note = 2'-O-methylcytidine-3'-phosphate
  modified_base 13: mod_base = OTHER; note = 2'-O-methylcytidine-3'-phosphate
  modified_base 14: mod_base = OTHER; note = 2'-O-methyluridine-3'-phosphate
  modified_base 15: mod_base = OTHER; note = 2'-O-methyluridine-3'-phosphate
  modified_base 16: mod_base = OTHER; note = 2'-O-methylguanosine-3'-phosphate
  modified_base 17: mod_base = OTHER; note = 2'-O-methyladenosine-3'-phosphate
  modified_base 18: mod_base = OTHER; note = 2'-O-methyluridine-3'-phosphate
  modified_base 19: mod_base = OTHER; note = 2'-O-methyladenosine-3'-phosphate
  modified_base 20: mod_base = OTHER; note = 2'-O-methyluridine-3'-phosphate
  modified_base 21: mod_base = OTHER; note = 2'-O-methyladenosine
ctgtggaggcaccttgatata

SEQ ID NO: 4012 - RNA, 21 nt, synthetic construct
  source 1..21: mol_type = other RNA
  modified_base 1: mod_base = OTHER; note = 2'-O-methyluridine-3'-phosphate
  modified_base 2: mod_base = OTHER; note = 2'-O-methylguanosine-3'-phosphate
  modified_base 3: mod_base = OTHER; note = 2'-O-methyluridine-3'-phosphate
  modified_base 4: mod_base = OTHER; note = 2'-O-methylguanosine-3'-phosphate
  modified_base 5: mod_base = OTHER; note = 2'-O-methylguanosine-3'-phosphate
  modified_base 6: mod_base = OTHER; note = 2'-O-methyladenosine-3'-phosphate
  modified_base 7: mod_base = OTHER; note = 2'-deoxy-2'-fluoroguanosine-3'-phosphate
  modified_base 8: mod_base = OTHER; note = 2'-O-methylguanosine-3'-phosphate
  modified_base 9: mod_base = OTHER; note = 2'-deoxy-2'-fluorocytidine-3'-phosphate
  modified_base 10: mod_base = OTHER; note = 2'-deoxy-2'-fluoroadenosine-3'-phosphate
  modified_base 11: mod_base = OTHER; note = 2'-deoxy-2'-fluorocytidine-3'-phosphate
  modified_base 12: mod_base = OTHER; note = 2'-O-methylcytidine-3'-phosphate
  modified_base 13: mod_base = OTHER; note = 2'-O-methyluridine-3'-phosphate
  modified_base 14: mod_base = OTHER; note = 2'-O-methyluridine-3'-phosphate
  modified_base 15: mod_base = OTHER; note = 2'-O-methylguanosine-3'-phosphate
  modified_base 16: mod_base = OTHER; note = 2'-O-methyladenosine-3'-phosphate
  modified_base 17: mod_base = OTHER; note = 2'-O-methyluridine-3'-phosphate
  modified_base 18: mod_base = OTHER; note = 2'-O-methyladenosine-3'-phosphate
  modified_base 19: mod_base = OTHER; note = 2'-O-methyluridine-3'-phosphate
  modified_base 20: mod_base = OTHER; note = 2'-O-methylcytidine-3'-phosphate
  modified_base 21: mod_base = OTHER; note = 2'-O-methyladenosine
tgtggaggcaccttgatatca

SEQ ID NO: 4013 - RNA, 21 nt, synthetic construct
  source 1..21: mol_type = other RNA
  modified_base 1: mod_base = OTHER; note = 2'-O-methylguanosine-3'-phosphate
  modified_base 2: mod_base = OTHER; note = 2'-O-methyluridine-3'-phosphate
  modified_base 3: mod_base = OTHER; note = 2'-O-methylguanosine-3'-phosphate
  modified_base 4: mod_base = OTHER; note = 2'-O-methylguanosine-3'-phosphate
  modified_base 5: mod_base = OTHER; note = 2'-O-methyladenosine-3'-phosphate
  modified_base 6: mod_base = OTHER; note = 2'-O-methylguanosine-3'-phosphate
  modified_base 7: mod_base = OTHER; note = 2'-deoxy-2'-fluoroguanosine-3'-phosphate
  modified_base 8: mod_base = OTHER; note = 2'-O-methylcytidine-3'-phosphate
  modified_base 9: mod_base = OTHER; note = 2'-deoxy-2'-fluoroadenosine-3'-phosphate
  modified_base 10: mod_base = OTHER; note = 2'-deoxy-2'-fluorocytidine-3'-phosphate
  modified_base 11: mod_base = OTHER; note = 2'-deoxy-2'-fluorocytidine-3'-phosphate
  modified_base 12: mod_base = OTHER; note = 2'-O-methyluridine-3'-phosphate
  modified_base 13: mod_base = OTHER; note = 2'-O-methyluridine-3'-phosphate
  modified_base 14: mod_base = OTHER; note = 2'-O-methylguanosine-3'-phosphate
  modified_base 15: mod_base = OTHER; note = 2'-O-methyladenosine-3'-phosphate
  modified_base 16: mod_base = OTHER; note = 2'-O-methyluridine-3'-phosphate
  modified_base 17: mod_base = OTHER; note = 2'-O-methyladenosine-3'-phosphate
  modified_base 18: mod_base = OTHER; note = 2'-O-methyluridine-3'-phosphate
  modified_base 19: mod_base = OTHER; note = 2'-O-methylcytidine-3'-phosphate
  modified_base 20: mod_base = OTHER; note = 2'-O-methylcytidine-3'-phosphate
  modified_base 21: mod_base = OTHER; note = 2'-O-methyladenosine
gtggaggcaccttgatatcca

SEQ ID NO: 4014 - RNA, 21 nt, synthetic construct
  source 1..21: mol_type = other RNA
  modified_base 1: mod_base = OTHER; note = 2'-O-methyluridine-3'-phosphate
  modified_base 2: mod_base = OTHER; note = 2'-O-methyluridine-3'-phosphate
  modified_base 3: mod_base = OTHER; note = 2'-O-methylguanosine-3'-phosphate
  modified_base 4: mod_base = OTHER; note = 2'-O-methyladenosine-3'-phosphate
  modified_base 5: mod_base = OTHER; note = 2'-O-methylcytidine-3'-phosphate
  modified_base 6: mod_base = OTHER; note = 2'-O-methyluridine-3'-phosphate
  modified_base 7: mod_base = OTHER; note = 2'-deoxy-2'-fluoroguanosine-3'-phosphate
  modified_base 8: mod_base = OTHER; note = 2'-O-methylcytidine-3'-phosphate
  modified_base 9: mod_base = OTHER; note = 2'-deoxy-2'-fluorouridine-3'-phosphate
  modified_base 10: mod_base = OTHER; note = 2'-deoxy-2'-fluoroguanosine-3'-phosphate
  modified_base 11: mod_base = OTHER; note = 2'-deoxy-2'-fluorocytidine-3'-phosphate
  modified_base 12: mod_base = OTHER; note = 2'-O-methylcytidine-3'-phosphate
  modified_base 13: mod_base = OTHER; note = 2'-O-methylcytidine-3'-phosphate
  modified_base 14: mod_base = OTHER; note = 2'-O-methyladenosine-3'-phosphate
  modified_base 15: mod_base = OTHER; note = 2'-O-methylcytidine-3'-phosphate
  modified_base 16: mod_base = OTHER; note = 2'-O-methyluridine-3'-phosphate
  modified_base 17: mod_base = OTHER; note = 2'-O-methylguanosine-3'-phosphate
  modified_base 18: mod_base = OTHER; note = 2'-O-methylcytidine-3'-phosphate
  modified_base 19: mod_base = OTHER; note = 2'-O-methyluridine-3'-phosphate
  modified_base 20: mod_base = OTHER; note = 2'-O-methyluridine-3'-phosphate
  modified_base 21: mod_base = OTHER; note = 2'-O-methyladenosine
ttgactgctgcccactgctta

SEQ ID NO: 4015 - RNA, 21 nt, synthetic construct
  source 1..21: mol_type = other RNA
  modified_base 1: mod_base = OTHER; note = 2'-O-methyluridine-3'-phosphate
  modified_base 2: mod_base = OTHER; note = 2'-O-methylguanosine-3'-phosphate
  modified_base 3: mod_base = OTHER; note = 2'-O-methyladenosine-3'-phosphate
  modified_base 4: mod_base = OTHER; note = 2'-O-methylcytidine-3'-phosphate
  modified_base 5: mod_base = OTHER; note = 2'-O-methyluridine-3'-phosphate
  modified_base 6: mod_base = OTHER; note = 2'-O-methylguanosine-3'-phosphate
  modified_base 7: mod_base = OTHER; note = 2'-deoxy-2'-fluorocytidine-3'-phosphate
  modified_base 8: mod_base = OTHER; note = 2'-O-methyluridine-3'-phosphate
  modified_base 9: mod_base = OTHER; note = 2'-deoxy-2'-fluoroguanosine-3'-phosphate
  modified_base 10: mod_base = OTHER; note = 2'-deoxy-2'-fluorocytidine-3'-phosphate
  modified_base 11: mod_base = OTHER; note = 2'-deoxy-2'-fluorocytidine-3'-phosphate
  modified_base 12: mod_base = OTHER; note = 2'-O-methylcytidine-3'-phosphate
  modified_base 13: mod_base = OTHER; note = 2'-O-methyladenosine-3'-phosphate
  modified_base 14: mod_base = OTHER; note = 2'-O-methylcytidine-3'-phosphate
  modified_base 15: mod_base = OTHER; note = 2'-O-methyluridine-3'-phosphate
  modified_base 16: mod_base = OTHER; note = 2'-O-methylguanosine-3'-phosphate
  modified_base 17: mod_base = OTHER; note = 2'-O-methylcytidine-3'-phosphate
  modified_base 18: mod_base = OTHER; note = 2'-O-methyluridine-3'-phosphate
  modified_base 19: mod_base = OTHER; note = 2'-O-methyluridine-3'-phosphate
  modified_base 20: mod_base = OTHER; note = 2'-O-methylguanosine-3'-phosphate
  modified_base 21: mod_base = OTHER; note = 2'-O-methyladenosine
tgactgctgcccactgcttga

SEQ ID NO: 4016 - RNA, 21 nt, synthetic construct
  source 1..21: mol_type = other RNA
  modified_base 1: mod_base = OTHER; note = 2'-O-methyladenosine-3'-phosphate
  modified_base 2: mod_base = OTHER; note = 2'-O-methylcytidine-3'-phosphate
  modified_base 3: mod_base = OTHER; note = 2'-O-methyluridine-3'-phosphate
  modified_base 4: mod_base = OTHER; note = 2'-O-methylguanosine-3'-phosphate
  modified_base 5: mod_base = OTHER; note = 2'-O-methylcytidine-3'-phosphate
  modified_base 6: mod_base = OTHER; note = 2'-O-methyluridine-3'-phosphate
  modified_base 7: mod_base = OTHER; note = 2'-deoxy-2'-fluoroguanosine-3'-phosphate
  modified_base 8: mod_base = OTHER; note = 2'-O-methylcytidine-3'-phosphate
  modified_base 9: mod_base = OTHER; note = 2'-deoxy-2'-fluorocytidine-3'-phosphate
  modified_base 10: mod_base = OTHER; note = 2'-deoxy-2'-fluorocytidine-3'-phosphate
  modified_base 11: mod_base = OTHER; note = 2'-deoxy-2'-fluoroadenosine-3'-phosphate
  modified_base 12: mod_base = OTHER; note = 2'-O-methylcytidine-3'-phosphate
  modified_base 13: mod_base = OTHER; note = 2'-O-methyluridine-3'-phosphate
  modified_base 14: mod_base = OTHER; note = 2'-O-methylguanosine-3'-phosphate
  modified_base 15: mod_base = OTHER; note = 2'-O-methylcytidine-3'-phosphate
  modified_base 16: mod_base = OTHER; note = 2'-O-methyluridine-3'-phosphate
  modified_base 17: mod_base = OTHER; note = 2'-O-methyluridine-3'-phosphate
  modified_base 18: mod_base = OTHER; note = 2'-O-methylguanosine-3'-phosphate
  modified_base 19: mod_base = OTHER; note = 2'-O-methylguanosine-3'-phosphate
  modified_base 20: mod_base = OTHER; note = 2'-O-methyladenosine-3'-phosphate
  modified_base 21: mod_base = OTHER; note = 2'-O-methyladenosine
actgctgcccactgcttggaa

SEQ ID NO: 4017 - RNA, 21 nt, synthetic construct
  source 1..21: mol_type = other RNA
  modified_base 1: mod_base = OTHER; note = 2'-O-methylcytidine-3'-phosphate
  modified_base 2: mod_base = OTHER; note = 2'-O-methyluridine-3'-phosphate
  modified_base 3: mod_base = OTHER; note = 2'-O-methylguanosine-3'-phosphate
  modified_base 4: mod_base = OTHER; note = 2'-O-methylcytidine-3'-phosphate
  modified_base 5: mod_base = OTHER; note = 2'-O-methyluridine-3'-phosphate
  modified_base 6: mod_base = OTHER; note = 2'-O-methylguanosine-3'-phosphate
  modified_base 7: mod_base = OTHER; note = 2'-deoxy-2'-fluorocytidine-3'-phosphate
  modified_base 8: mod_base = OTHER; note = 2'-O-methylcytidine-3'-phosphate
  modified_base 9: mod_base = OTHER; note = 2'-deoxy-2'-fluorocytidine-3'-phosphate
  modified_base 10: mod_base = OTHER; note = 2'-deoxy-2'-fluoroadenosine-3'-phosphate
  modified_base 11: mod_base = OTHER; note = 2'-deoxy-2'-fluorocytidine-3'-phosphate
  modified_base 12: mod_base = OTHER; note = 2'-O-methyluridine-3'-phosphate
  modified_base 13: mod_base = OTHER; note = 2'-O-methylguanosine-3'-phosphate
  modified_base 14: mod_base = OTHER; note = 2'-O-methylcytidine-3'-phosphate
  modified_base 15: mod_base = OTHER; note = 2'-O-methyluridine-3'-phosphate
  modified_base 16: mod_base = OTHER; note = 2'-O-methyluridine-3'-phosphate
  modified_base 17: mod_base = OTHER; note = 2'-O-methylguanosine-3'-phosphate
  modified_base 18: mod_base = OTHER; note = 2'-O-methylguanosine-3'-phosphate
  modified_base 19: mod_base = OTHER; note = 2'-O-methyladenosine-3'-phosphate
  modified_base 20: mod_base = OTHER; note = 2'-O-methylguanosine-3'-phosphate
  modified_base 21: mod_base = OTHER; note = 2'-O-methyladenosine
ctgctgcccactgcttggaga

SEQ ID NO: 4018 - RNA, 21 nt, synthetic construct
  source 1..21: mol_type = other RNA
  modified_base 1: mod_base = OTHER; note = 2'-O-methyluridine-3'-phosphate
  modified_base 2: mod_base = OTHER; note = 2'-O-methylguanosine-3'-phosphate
  modified_base 3: mod_base = OTHER; note = 2'-O-methylcytidine-3'-phosphate
  modified_base 4: mod_base = OTHER; note = 2'-O-methyluridine-3'-phosphate
  modified_base 5: mod_base = OTHER; note = 2'-O-methylguanosine-3'-phosphate
  modified_base 6: mod_base = OTHER; note = 2'-O-methylcytidine-3'-phosphate
  modified_base 7: mod_base = OTHER; note = 2'-deoxy-2'-fluorocytidine-3'-phosphate
  modified_base 8: mod_base = OTHER; note = 2'-O-methylcytidine-3'-phosphate
  modified_base 9: mod_base = OTHER; note = 2'-deoxy-2'-fluoroadenosine-3'-phosphate
  modified_base 10: mod_base = OTHER; note = 2'-deoxy-2'-fluorocytidine-3'-phosphate
  modified_base 11: mod_base = OTHER; note = 2'-deoxy-2'-fluorouridine-3'-phosphate
  modified_base 12: mod_base = OTHER; note = 2'-O-methylguanosine-3'-phosphate
  modified_base 13: mod_base = OTHER; note = 2'-O-methylcytidine-3'-phosphate
  modified_base 14: mod_base = OTHER; note = 2'-O-methyluridine-3'-phosphate
  modified_base 15: mod_base = OTHER; note = 2'-O-methyluridine-3'-phosphate
  modified_base 16: mod_base = OTHER; note = 2'-O-methylguanosine-3'-phosphate
  modified_base 17: mod_base = OTHER; note = 2'-O-methylguanosine-3'-phosphate
  modified_base 18: mod_base = OTHER; note = 2'-O-methyladenosine-3'-phosphate
  modified_base 19: mod_base = OTHER; note = 2'-O-methylguanosine-3'-phosphate
  modified_base 20: mod_base = OTHER; note = 2'-O-methyladenosine-3'-phosphate
  modified_base 21: mod_base = OTHER; note = 2'-O-methyladenosine
tgctgcccactgcttggagaa

SEQ ID NO: 4019 - RNA, 21 nt, synthetic construct
  source 1..21: mol_type = other RNA
  modified_base 1: mod_base = OTHER; note = 2'-O-methylcytidine-3'-phosphate
  modified_base 2: mod_base = OTHER; note = 2'-O-methyluridine-3'-phosphate
  modified_base 3: mod_base = OTHER; note = 2'-O-methylguanosine-3'-phosphate
  modified_base 4: mod_base = OTHER; note = 2'-O-methylcytidine-3'-phosphate
  modified_base 5: mod_base = OTHER; note = 2'-O-methylcytidine-3'-phosphate
  modified_base 6: mod_base = OTHER; note = 2'-O-methylcytidine-3'-phosphate
  modified_base 7: mod_base = OTHER; note = 2'-deoxy-2'-fluoroadenosine-3'-phosphate
  modified_base 8: mod_base = OTHER; note = 2'-O-methylcytidine-3'-phosphate
  modified_base 9: mod_base = OTHER; note = 2'-deoxy-2'-fluorouridine-3'-phosphate
  modified_base 10: mod_base = OTHER; note = 2'-deoxy-2'-fluoroguanosine-3'-phosphate
  modified_base 11: mod_base = OTHER; note = 2'-deoxy-2'-fluorocytidine-3'-phosphate
  modified_base 12: mod_base = OTHER; note = 2'-O-methyluridine-3'-phosphate
  modified_base 13: mod_base = OTHER; note = 2'-O-methyluridine-3'-phosphate
  modified_base 14: mod_base = OTHER; note = 2'-O-methylguanosine-3'-phosphate
  modified_base 15: mod_base = OTHER; note = 2'-O-methylguanosine-3'-phosphate
  modified_base 16: mod_base = OTHER; note = 2'-O-methyladenosine-3'-phosphate
  modified_base 17: mod_base = OTHER; note = 2'-O-methylguanosine-3'-phosphate
  modified_base 18: mod_base = OTHER; note = 2'-O-methyladenosine-3'-phosphate
  modified_base 19: mod_base = OTHER; note = 2'-O-methyladenosine-3'-phosphate
  modified_base 20: mod_base = OTHER; note = 2'-O-methylguanosine-3'-phosphate
  modified_base 21: mod_base = OTHER; note = 2'-O-methyladenosine
ctgcccactgcttggagaaga

SEQ ID NO: 4020 - RNA, 21 nt, synthetic construct
  source 1..21: mol_type = other RNA
  modified_base 1: mod_base = OTHER; note = 2'-O-methyluridine-3'-phosphate
  modified_base 2: mod_base = OTHER; note = 2'-O-methylguanosine-3'-phosphate
  modified_base 3: mod_base = OTHER; note = 2'-O-methylcytidine-3'-phosphate
  modified_base 4: mod_base = OTHER; note = 2'-O-methylcytidine-3'-phosphate
  modified_base 5: mod_base = OTHER; note = 2'-O-methylcytidine-3'-phosphate
  modified_base 6: mod_base = OTHER; note = 2'-O-methyladenosine-3'-phosphate
  modified_base 7: mod_base = OTHER; note = 2'-deoxy-2'-fluorocytidine-3'-phosphate
  modified_base 8: mod_base = OTHER; note = 2'-O-methyluridine-3'-phosphate
  modified_base 9: mod_base = OTHER; note = 2'-deoxy-2'-fluoroguanosine-3'-phosphate
  modified_base 10: mod_base = OTHER; note = 2'-deoxy-2'-fluorocytidine-3'-phosphate
  modified_base 11: mod_base = OTHER; note = 2'-deoxy-2'-fluorouridine-3'-phosphate
  modified_base 12: mod_base = OTHER; note = 2'-O-methyluridine-3'-phosphate
  modified_base 13: mod_base = OTHER; note = 2'-O-methylguanosine-3'-phosphate
  modified_base 14: mod_base = OTHER; note = 2'-O-methylguanosine-3'-phosphate
  modified_base 15: mod_base = OTHER; note = 2'-O-methyladenosine-3'-phosphate
  modified_base 16: mod_base = OTHER; note = 2'-O-methylguanosine-3'-phosphate
  modified_base 17: mod_base = OTHER; note = 2'-O-methyladenosine-3'-phosphate
  modified_base 18: mod_base = OTHER; note = 2'-O-methyladenosine-3'-phosphate
  modified_base 19: mod_base = OTHER; note = 2'-O-methylguanosine-3'-phosphate
  modified_base 20: mod_base = OTHER; note = 2'-O-methyluridine-3'-phosphate
  modified_base 21: mod_base = OTHER; note = 2'-O-methyladenosine
tgcccactgcttggagaagta

SEQ ID NO: 4021 - RNA, 21 nt, synthetic construct
  source 1..21: mol_type = other RNA
  modified_base 1: mod_base = OTHER; note = 2'-O-methylcytidine-3'-phosphate
  modified_base 2: mod_base = OTHER; note = 2'-O-methylcytidine-3'-phosphate
  modified_base 3: mod_base = OTHER; note = 2'-O-methylcytidine-3'-phosphate
  modified_base 4: mod_base = OTHER; note = 2'-O-methyladenosine-3'-phosphate
  modified_base 5: mod_base = OTHER; note = 2'-O-methylcytidine-3'-phosphate
  modified_base 6: mod_base = OTHER; note = 2'-O-methyluridine-3'-phosphate
  modified_base 7: mod_base = OTHER; note = 2'-deoxy-2'-fluoroguanosine-3'-phosphate
  modified_base 8: mod_base = OTHER; note = 2'-O-methylcytidine-3'-phosphate
  modified_base 9: mod_base = OTHER; note = 2'-deoxy-2'-fluorouridine-3'-phosphate
  modified_base 10: mod_base = OTHER; note = 2'-deoxy-2'-fluorouridine-3'-phosphate
  modified_base 11: mod_base = OTHER; note = 2'-deoxy-2'-fluoroguanosine-3'-phosphate
  modified_base 12: mod_base = OTHER; note = 2'-O-methylguanosine-3'-phosphate
  modified_base 13: mod_base = OTHER; note = 2'-O-methyladenosine-3'-phosphate
  modified_base 14: mod_base = OTHER; note = 2'-O-methylguanosine-3'-phosphate
  modified_base 15: mod_base = OTHER; note = 2'-O-methyladenosine-3'-phosphate
  modified_base 16: mod_base = OTHER; note = 2'-O-methyladenosine-3'-phosphate
  modified_base 17: mod_base = OTHER; note = 2'-O-methylguanosine-3'-phosphate
  modified_base 18: mod_base = OTHER; note = 2'-O-methyluridine-3'-phosphate
  modified_base 19: mod_base = OTHER; note = 2'-O-methylcytidine-3'-phosphate
  modified_base 20: mod_base = OTHER; note = 2'-O-methylcytidine-3'-phosphate
  modified_base 21: mod_base = OTHER; note = 2'-O-methyladenosine
cccactgcttggagaagtcca

SEQ ID NO: 4022 - RNA, 21 nt, synthetic construct
  source 1..21: mol_type = other RNA
  modified_base 1: mod_base = OTHER; note = 2'-O-methylguanosine-3'-phosphate
  modified_base 2: mod_base = OTHER; note = 2'-O-methyluridine-3'-phosphate
  modified_base 3: mod_base = OTHER; note = 2'-O-methylguanosine-3'-phosphate
  modified_base 4: mod_base = OTHER; note = 2'-O-methylcytidine-3'-phosphate
  modified_base 5: mod_base = OTHER; note = 2'-O-methyladenosine-3'-phosphate
  modified_base 6: mod_base = OTHER; note = 2'-O-methylcytidine-3'-phosphate
  modified_base 7: mod_base = OTHER; note = 2'-deoxy-2'-fluoroadenosine-3'-phosphate
  modified_base 8: mod_base = OTHER; note = 2'-O-methylcytidine-3'-phosphate
  modified_base 9: mod_base = OTHER; note = 2'-deoxy-2'-fluorocytidine-3'-phosphate
  modified_base 10: mod_base = OTHER; note = 2'-deoxy-2'-fluoroadenosine-3'-phosphate
  modified_base 11: mod_base = OTHER; note = 2'-deoxy-2'-fluoroadenosine-3'-phosphate
  modified_base 12: mod_base = OTHER; note = 2'-O-methylguanosine-3'-phosphate
  modified_base 13: mod_base = OTHER; note = 2'-O-methyladenosine-3'-phosphate
  modified_base 14: mod_base = OTHER; note = 2'-O-methyladenosine-3'-phosphate
  modified_base 15: mod_base = OTHER; note = 2'-O-methylguanosine-3'-phosphate
  modified_base 16: mod_base = OTHER; note = 2'-O-methyluridine-3'-phosphate
  modified_base 17: mod_base = OTHER; note = 2'-O-methylguanosine-3'-phosphate
  modified_base 18: mod_base = OTHER; note = 2'-O-methyladenosine-3'-phosphate
  modified_base 19: mod_base = OTHER; note = 2'-O-methyladenosine-3'-phosphate
  modified_base 20: mod_base = OTHER; note = 2'-O-methyluridine-3'-phosphate
  modified_base 21: mod_base = OTHER; note = 2'-O-methyladenosine
gtgcacaccaagaagtgaata

SEQ ID NO: 4023 - RNA, 21 nt, synthetic construct
  source 1..21: mol_type = other RNA
  modified_base 1: mod_base = OTHER; note = 2'-O-methylguanosine-3'-phosphate
  modified_base 2: mod_base = OTHER; note = 2'-O-methylcytidine-3'-phosphate
  modified_base 3: mod_base = OTHER; note = 2'-O-methyladenosine-3'-phosphate
  modified_base 4: mod_base = OTHER; note = 2'-O-methylcytidine-3'-phosphate
  modified_base 5: mod_base = OTHER; note = 2'-O-methyladenosine-3'-phosphate
  modified_base 6: mod_base = OTHER; note = 2'-O-methylcytidine-3'-phosphate
  modified_base 7: mod_base = OTHER; note = 2'-deoxy-2'-fluorocytidine-3'-phosphate
  modified_base 8: mod_base = OTHER; note = 2'-O-methyladenosine-3'-phosphate
  modified_base 9: mod_base = OTHER; note = 2'-deoxy-2'-fluoroadenosine-3'-phosphate
  modified_base 10: mod_base = OTHER; note = 2'-deoxy-2'-fluoroguanosine-3'-phosphate
  modified_base 11: mod_base = OTHER; note = 2'-deoxy-2'-fluoroadenosine-3'-phosphate
  modified_base 12: mod_base = OTHER; note = 2'-O-methyladenosine-3'-phosphate
  modified_base 13: mod_base = OTHER; note = 2'-O-methylguanosine-3'-phosphate
  modified_base 14: mod_base = OTHER; note = 2'-O-methyluridine-3'-phosphate
  modified_base 15: mod_base = OTHER; note = 2'-O-methylguanosine-3'-phosphate
  modified_base 16: mod_base = OTHER; note = 2'-O-methyladenosine-3'-phosphate
  modified_base 17: mod_base = OTHER; note = 2'-O-methyladenosine-3'-phosphate
  modified_base 18: mod_base = OTHER; note = 2'-O-methyluridine-3'-phosphate
  modified_base 19: mod_base = OTHER; note = 2'-O-methylcytidine-3'-phosphate
  modified_base 20: mod_base = OTHER; note = 2'-O-methyluridine-3'-phosphate
  modified_base 21: mod_base = OTHER; note = 2'-O-methyladenosine
gcacaccaagaagtgaatcta

SEQ ID NO: 4024 - RNA, 21 nt, synthetic construct
  source 1..21: mol_type = other RNA
  modified_base 1: mod_base = OTHER; note = 2'-O-methyladenosine-3'-phosphate
  modified_base 2: mod_base = OTHER; note = 2'-O-methylcytidine-3'-phosphate
  modified_base 3: mod_base = OTHER; note = 2'-O-methyladenosine-3'-phosphate
  modified_base 4: mod_base = OTHER; note = 2'-O-methylcytidine-3'-phosphate
  modified_base 5: mod_base = OTHER; note = 2'-O-methylcytidine-3'-phosphate
  modified_base 6: mod_base = OTHER; note = 2'-O-methyladenosine-3'-phosphate
  modified_base 7: mod_base = OTHER; note = 2'-deoxy-2'-fluoroadenosine-3'-phosphate
  modified_base 8: mod_base = OTHER; note = 2'-O-methylguanosine-3'-phosphate
  modified_base 9: mod_base = OTHER; note = 2'-deoxy-2'-fluoroadenosine-3'-phosphate
  modified_base 10: mod_base = OTHER; note = 2'-deoxy-2'-fluoroadenosine-3'-phosphate
  modified_base 11: mod_base = OTHER; note = 2'-deoxy-2'-fluoroguanosine-3'-phosphate
  modified_base 12: mod_base = OTHER; note = 2'-O-methyluridine-3'-phosphate
  modified_base 13: mod_base = OTHER; note = 2'-O-methylguanosine-3'-phosphate
  modified_base 14: mod_base = OTHER; note = 2'-O-methyladenosine-3'-phosphate
  modified_base 15: mod_base = OTHER; note = 2'-O-methyladenosine-3'-phosphate
  modified_base 16: mod_base = OTHER; note = 2'-O-methyluridine-3'-phosphate
  modified_base 17: mod_base = OTHER; note = 2'-O-methylcytidine-3'-phosphate
  modified_base 18: mod_base = OTHER; note = 2'-O-methyluridine-3'-phosphate
  modified_base 19: mod_base = OTHER; note = 2'-O-methylcytidine-3'-phosphate
  modified_base 20: mod_base = OTHER; note = 2'-O-methylguanosine-3'-phosphate
  modified_base 21: mod_base = OTHER; note = 2'-O-methyladenosine
acaccaagaagtgaatctcga

SEQ ID NO: 4025 - RNA, 21 nt, synthetic construct
  source 1..21: mol_type = other RNA
  modified_base 1: mod_base = OTHER; note = 2'-O-methylcytidine-3'-phosphate
  modified_base 2: mod_base = OTHER; note = 2'-O-methyladenosine-3'-phosphate
  modified_base 3: mod_base = OTHER; note = 2'-O-methylcytidine-3'-phosphate
  modified_base 4: mod_base = OTHER; note = 2'-O-methylcytidine-3'-phosphate
  modified_base 5: mod_base = OTHER; note = 2'-O-methyladenosine-3'-phosphate
  modified_base 6: mod_base = OTHER; note = 2'-O-methyladenosine-3'-phosphate
  modified_base 7: mod_base = OTHER; note = 2'-deoxy-2'-fluoroguanosine-3'-phosphate
  modified_base 8: mod_base = OTHER; note = 2'-O-methyladenosine-3'-phosphate
  modified_base 9: mod_base = OTHER; note = 2'-deoxy-2'-fluoroadenosine-3'-phosphate
  modified_base 10: mod_base = OTHER; note = 2'-deoxy-2'-fluoroguanosine-3'-phosphate
  modified_base 11: mod_base = OTHER; note = 2'-deoxy-2'-fluorouridine-3'-phosphate
  modified_base 12: mod_base = OTHER; note = 2'-O-methylguanosine-3'-phosphate
  modified_base 13: mod_base = OTHER; note = 2'-O-methyladenosine-3'-phosphate
  modified_base 14: mod_base = OTHER; note = 2'-O-methyladenosine-3'-phosphate
  modified_base 15: mod_base = OTHER; note = 2'-O-methyluridine-3'-phosphate
  modified_base 16: mod_base = OTHER; note = 2'-O-methylcytidine-3'-phosphate
  modified_base 17: mod_base = OTHER; note = 2'-O-methyluridine-3'-phosphate
  modified_base 18: mod_base = OTHER; note = 2'-O-methylcytidine-3'-phosphate
  modified_base 19: mod_base = OTHER; note = 2'-O-methylguanosine-3'-phosphate
  modified_base 20: mod_base = OTHER; note = 2'-O-methyladenosine-3'-phosphate
  modified_base 21: mod_base = OTHER; note = 2'-O-methyladenosine
caccaagaagtgaatctcgaa

SEQ ID NO: 4026 - RNA, 21 nt, synthetic construct
  source 1..21: mol_type = other RNA
  modified_base 1: mod_base = OTHER; note = 2'-O-methyladenosine-3'-phosphate
  modified_base 2: mod_base = OTHER; note = 2'-O-methylcytidine-3'-phosphate
  modified_base 3: mod_base = OTHER; note = 2'-O-methylcytidine-3'-phosphate
  modified_base 4: mod_base = OTHER; note = 2'-O-methyladenosine-3'-phosphate
  modified_base 5: mod_base = OTHER; note = 2'-O-methyladenosine-3'-phosphate
  modified_base 6: mod_base = OTHER; note = 2'-O-methylguanosine-3'-phosphate
  modified_base 7: mod_base = OTHER; note = 2'-deoxy-2'-fluoroadenosine-3'-phosphate
  modified_base 8: mod_base = OTHER; note = 2'-O-methyladenosine-3'-phosphate
  modified_base 9: mod_base = OTHER; note = 2'-deoxy-2'-fluoroguanosine-3'-phosphate
  modified_base 10: mod_base = OTHER; note = 2'-deoxy-2'-fluorouridine-3'-phosphate
  modified_base 11: mod_base = OTHER; note = 2'-deoxy-2'-fluoroguanosine-3'-phosphate
  modified_base 12: mod_base = OTHER; note = 2'-O-methyladenosine-3'-phosphate
  modified_base 13: mod_base = OTHER; note = 2'-O-methyladenosine-3'-phosphate
  modified_base 14: mod_base = OTHER; note = 2'-O-methyluridine-3'-phosphate
  modified_base 15: mod_base = OTHER; note = 2'-O-methylcytidine-3'-phosphate
  modified_base 16: mod_base = OTHER; note = 2'-O-methyluridine-3'-phosphate
  modified_base 17: mod_base = OTHER; note = 2'-O-methylcytidine-3'-phosphate
  modified_base 18: mod_base = OTHER; note = 2'-O-methylguanosine-3'-phosphate
  modified_base 19: mod_base = OTHER; note = 2'-O-methyladenosine-3'-phosphate
  modified_base 20: mod_base = OTHER; note = 2'-O-methyladenosine-3'-phosphate
  modified_base 21: mod_base = OTHER; note = 2'-O-methyladenosine
accaagaagtgaatctcgaaa

SEQ ID NO: 4027 - RNA, 21 nt, synthetic construct
  source 1..21: mol_type = other RNA
  modified_base 1: mod_base = OTHER; note = 2'-O-methyluridine-3'-phosphate
  modified_base 2: mod_base = OTHER; note = 2'-O-methylguanosine-3'-phosphate
  modified_base 3: mod_base = OTHER; note = 2'-O-methyladenosine-3'-phosphate
  modified_base 4: mod_base = OTHER; note = 2'-O-methyladenosine-3'-phosphate
  modified_base 5: mod_base = OTHER; note = 2'-O-methyluridine-3'-phosphate
  modified_base 6: mod_base = OTHER; note = 2'-O-methylcytidine-3'-phosphate
  modified_base 7: mod_base = OTHER; note = 2'-deoxy-2'-fluorouridine-3'-phosphate
  modified_base 8: mod_base = OTHER; note = 2'-O-methylcytidine-3'-phosphate
  modified_base 9: mod_base = OTHER; note = 2'-deoxy-2'-fluoroguanosine-3'-phosphate
  modified_base 10: mod_base = OTHER; note = 2'-deoxy-2'-fluoroadenosine-3'-phosphate
  modified_base 11: mod_base = OTHER; note = 2'-deoxy-2'-fluoroadenosine-3'-phosphate
  modified_base 12: mod_base = OTHER; note = 2'-O-methylcytidine-3'-phosphate
  modified_base 13: mod_base = OTHER; note = 2'-O-methylcytidine-3'-phosphate
  modified_base 14: mod_base = OTHER; note = 2'-O-methylguanosine-3'-phosphate
  modified_base 15: mod_base = OTHER; note = 2'-O-methylcytidine-3'-phosphate
  modified_base 16: mod_base = OTHER; note = 2'-O-methyladenosine-3'-phosphate
  modified_base 17: mod_base = OTHER; note = 2'-O-methyluridine-3'-phosphate
  modified_base 18: mod_base = OTHER; note = 2'-O-methylguanosine-3'-phosphate
  modified_base 19: mod_base = OTHER; note = 2'-O-methyluridine-3'-phosphate
  modified_base 20: mod_base = OTHER; note = 2'-O-methyluridine-3'-phosphate
  modified_base 21: mod_base = OTHER; note = 2'-O-methyladenosine
tgaatctcgaaccgcatgtta

SEQ ID NO: 4028 - RNA, 21 nt, synthetic construct
  source 1..21: mol_type = other RNA
  modified_base 1: mod_base = OTHER; note = 2'-O-methyladenosine-3'-phosphate
  modified_base 2: mod_base = OTHER; note = 2'-O-methyladenosine-3'-phosphate
  modified_base 3: mod_base = OTHER; note = 2'-O-methyluridine-3'-phosphate
  modified_base 4: mod_base = OTHER; note = 2'-O-methylcytidine-3'-phosphate
  modified_base 5: mod_base = OTHER; note = 2'-O-methyluridine-3'-phosphate
  modified_base 6: mod_base = OTHER; note = 2'-O-methylcytidine-3'-phosphate
  modified_base 7: mod_base = OTHER; note = 2'-deoxy-2'-fluoroguanosine-3'-phosphate
  modified_base 8: mod_base = OTHER; note = 2'-O-methyladenosine-3'-phosphate
  modified_base 9: mod_base = OTHER; note = 2'-deoxy-2'-fluoroadenosine-3'-phosphate
  modified_base 10: mod_base = OTHER; note = 2'-deoxy-2'-fluorocytidine-3'-phosphate
  modified_base 11: mod_base = OTHER; note = 2'-deoxy-2'-fluorocytidine-3'-phosphate
  modified_base 12: mod_base = OTHER; note = 2'-O-methylguanosine-3'-phosphate
  modified_base 13: mod_base = OTHER; note = 2'-O-methylcytidine-3'-phosphate
  modified_base 14: mod_base = OTHER; note = 2'-O-methyladenosine-3'-phosphate
  modified_base 15: mod_base = OTHER; note = 2'-O-methyluridine-3'-phosphate
  modified_base 16: mod_base = OTHER; note = 2'-O-methylguanosine-3'-phosphate
  modified_base 17: mod_base = OTHER; note = 2'-O-methyluridine-3'-phosphate
  modified_base 18: mod_base = OTHER; note = 2'-O-methyluridine-3'-phosphate
  modified_base 19: mod_base = OTHER; note = 2'-O-methylcytidine-3'-phosphate
  modified_base 20: mod_base = OTHER; note = 2'-O-methyladenosine-3'-phosphate
  modified_base 21: mod_base = OTHER; note = 2'-O-methyladenosine
aatctcgaaccgcatgttcaa

SEQ ID NO: 4029 - RNA, 21 nt, synthetic construct
  source 1..21: mol_type = other RNA
  modified_base 1: mod_base = OTHER; note = 2'-O-methylcytidine-3'-phosphate
  modified_base 2: mod_base = OTHER; note = 2'-O-methylguanosine-3'-phosphate
  modified_base 3: mod_base = OTHER; note = 2'-O-methyladenosine-3'-phosphate
  modified_base 4: mod_base = OTHER; note = 2'-O-methyladenosine-3'-phosphate
  modified_base 5: mod_base = OTHER; note = 2'-O-methylcytidine-3'-phosphate
  modified_base 6: mod_base = OTHER; note = 2'-O-methylcytidine-3'-phosphate
  modified_base 7: mod_base = OTHER; note = 2'-deoxy-2'-fluoroguanosine-3'-phosphate
  modified_base 8: mod_base = OTHER; note = 2'-O-methylcytidine-3'-phosphate
  modified_base 9: mod_base = OTHER; note = 2'-deoxy-2'-fluoroadenosine-3'-phosphate
  modified_base 10: mod_base = OTHER; note = 2'-deoxy-2'-fluorouridine-3'-phosphate
  modified_base 11: mod_base = OTHER; note = 2'-deoxy-2'-fluoroguanosine-3'-phosphate
  modified_base 12: mod_base = OTHER; note = 2'-O-methyluridine-3'-phosphate
  modified_base 13: mod_base = OTHER; note = 2'-O-methyluridine-3'-phosphate
  modified_base 14: mod_base = OTHER; note = 2'-O-methylcytidine-3'-phosphate
  modified_base 15: mod_base = OTHER; note = 2'-O-methyladenosine-3'-phosphate
  modified_base 16: mod_base = OTHER; note = 2'-O-methylguanosine-3'-phosphate
  modified_base 17: mod_base = OTHER; note = 2'-O-methylguanosine-3'-phosphate
  modified_base 18: mod_base = OTHER; note = 2'-O-methyladenosine-3'-phosphate
  modified_base 19: mod_base = OTHER; note = 2'-O-methyladenosine-3'-phosphate
  modified_base 20: mod_base = OTHER; note = 2'-O-methyladenosine-3'-phosphate
  modified_base 21: mod_base = OTHER; note = 2'-O-methyladenosine
cgaaccgcatgttcaggaaaa

SEQ ID NO: 4030 - RNA, 21 nt, synthetic construct
  source 1..21: mol_type = other RNA
  modified_base 1: mod_base = OTHER; note = 2'-O-methylguanosine-3'-phosphate
  modified_base 2: mod_base = OTHER; note = 2'-O-methyladenosine-3'-phosphate
  modified_base 3: mod_base = OTHER; note = 2'-O-methyladenosine-3'-phosphate
  modified_base 4: mod_base = OTHER; note = 2'-O-methylcytidine-3'-phosphate
  modified_base 5: mod_base = OTHER; note = 2'-O-methylcytidine-3'-phosphate
  modified_base 6: mod_base = OTHER; note = 2'-O-methylguanosine-3'-phosphate
  modified_base 7: mod_base = OTHER; note = 2'-deoxy-2'-fluorocytidine-3'-phosphate
  modified_base 8: mod_base = OTHER; note = 2'-O-methyladenosine-3'-phosphate
  modified_base 9: mod_base = OTHER; note = 2'-deoxy-2'-fluorouridine-3'-phosphate
  modified_base 10: mod_base = OTHER; note = 2'-deoxy-2'-fluoroguanosine-3'-phosphate
  modified_base 11: mod_base = OTHER; note = 2'-deoxy-2'-fluorouridine-3'-phosphate
  modified_base 12: mod_base = OTHER; note = 2'-O-methyluridine-3'-phosphate
  modified_base 13: mod_base = OTHER; note = 2'-O-methylcytidine-3'-phosphate
  modified_base 14: mod_base = OTHER; note = 2'-O-methyladenosine-3'-phosphate
  modified_base 15: mod_base = OTHER; note = 2'-O-methylguanosine-3'-phosphate
  modified_base 16: mod_base = OTHER; note = 2'-O-methylguanosine-3'-phosphate
  modified_base 17: mod_base = OTHER; note = 2'-O-methyladenosine-3'-phosphate
  modified_base 18: mod_base = OTHER; note = 2'-O-methyladenosine-3'-phosphate
  modified_base 19: mod_base = OTHER; note = 2'-O-methyladenosine-3'-phosphate
  modified_base 20: mod_base = OTHER; note = 2'-O-methyluridine-3'-phosphate
  modified_base 21: mod_base = OTHER; note = 2'-O-methyladenosine
gaaccgcatgttcaggaaata

SEQ ID NO: 4031 - RNA, 21 nt, synthetic construct
  source 1..21: mol_type = other RNA
  modified_base 1: mod_base = OTHER; note = 2'-O-methyladenosine-3'-phosphate
  modified_base 2: mod_base = OTHER; note = 2'-O-methyladenosine-3'-phosphate
  modified_base 3: mod_base = OTHER; note = 2'-O-methylcytidine-3'-phosphate
  modified_base 4: mod_base = OTHER; note = 2'-O-methylcytidine-3'-phosphate
  modified_base 5: mod_base = OTHER; note = 2'-O-methylguanosine-3'-phosphate
  modified_base 6: mod_base = OTHER; note = 2'-O-methylcytidine-3'-phosphate
  modified_base 7: mod_base = OTHER; note = 2'-deoxy-2'-fluoroadenosine-3'-phosphate
  modified_base 8: mod_base = OTHER; note = 2'-O-methyluridine-3'-phosphate
  modified_base 9: mod_base = OTHER; note = 2'-deoxy-2'-fluoroguanosine-3'-phosphate
  modified_base 10: mod_base = OTHER; note = 2'-deoxy-2'-fluorouridine-3'-phosphate
  modified_base 11: mod_base = OTHER; note = 2'-deoxy-2'-fluorouridine-3'-phosphate
  modified_base 12: mod_base = OTHER; note = 2'-O-methylcytidine-3'-phosphate
  modified_base 13: mod_base = OTHER; note = 2'-O-methyladenosine-3'-phosphate
  modified_base 14: mod_base = OTHER; note = 2'-O-methylguanosine-3'-phosphate
  modified_base 15: mod_base = OTHER; note = 2'-O-methylguanosine-3'-phosphate
  modified_base 16: mod_base = OTHER; note = 2'-O-methyladenosine-3'-phosphate
  modified_base 17: mod_base = OTHER; note = 2'-O-methyladenosine-3'-phosphate
  modified_base 18: mod_base = OTHER; note = 2'-O-methyladenosine-3'-phosphate
  modified_base 19: mod_base = OTHER; note = 2'-O-methyluridine-3'-phosphate
  modified_base 20: mod_base = OTHER; note = 2'-O-methyladenosine-3'-phosphate
  modified_base 21: mod_base = OTHER; note = 2'-O-methyladenosine
aaccgcatgttcaggaaataa

SEQ ID NO: 4032 - RNA, 21 nt, synthetic construct
  source 1..21: mol_type = other RNA
  modified_base 1: mod_base = OTHER; note = 2'-O-methyladenosine-3'-phosphate
  modified_base 2: mod_base = OTHER; note = 2'-O-methylcytidine-3'-phosphate
  modified_base 3: mod_base = OTHER; note = 2'-O-methylcytidine-3'-phosphate
  modified_base 4: mod_base = OTHER; note = 2'-O-methylguanosine-3'-phosphate
  modified_base 5: mod_base = OTHER; note = 2'-O-methylcytidine-3'-phosphate
  modified_base 6: mod_base = OTHER; note = 2'-O-methyladenosine-3'-phosphate
  modified_base 7: mod_base = OTHER; note = 2'-deoxy-2'-fluorouridine-3'-phosphate
  modified_base 8: mod_base = OTHER; note = 2'-O-methylguanosine-3'-phosphate
  modified_base 9: mod_base = OTHER; note = 2'-deoxy-2'-fluorouridine-3'-phosphate
  modified_base 10: mod_base = OTHER; note = 2'-deoxy-2'-fluorouridine-3'-phosphate
  modified_base 11: mod_base = OTHER; note = 2'-deoxy-2'-fluorocytidine-3'-phosphate
  modified_base 12: mod_base = OTHER; note = 2'-O-methyladenosine-3'-phosphate
  modified_base 13: mod_base = OTHER; note = 2'-O-methylguanosine-3'-phosphate
  modified_base 14: mod_base = OTHER; note = 2'-O-methylguanosine-3'-phosphate
  modified_base 15: mod_base = OTHER; note = 2'-O-methyladenosine-3'-phosphate
  modified_base 16: mod_base = OTHER; note = 2'-O-methyladenosine-3'-phosphate
  modified_base 17: mod_base = OTHER; note = 2'-O-methyladenosine-3'-phosphate
  modified_base 18: mod_base = OTHER; note = 2'-O-methyluridine-3'-phosphate
  modified_base 19: mod_base = OTHER; note = 2'-O-methyladenosine-3'-phosphate
  modified_base 20: mod_base = OTHER; note = 2'-O-methylguanosine-3'-phosphate
  modified_base 21: mod_base = OTHER; note = 2'-O-methyladenosine
accgcatgttcaggaaataga

SEQ ID NO: 4033 - RNA, 21 nt, synthetic construct
  source 1..21: mol_type = other RNA
  modified_base 1: mod_base = OTHER; note = 2'-O-methylcytidine-3'-phosphate
  modified_base 2: mod_base = OTHER; note = 2'-O-methylcytidine-3'-phosphate
  modified_base 3: mod_base = OTHER; note = 2'-O-methylguanosine-3'-phosphate
  modified_base 4: mod_base = OTHER; note = 2'-O-methylcytidine-3'-phosphate
  modified_base 5: mod_base = OTHER; note = 2'-O-methyladenosine-3'-phosphate
  modified_base 6: mod_base = OTHER; note = 2'-O-methyluridine-3'-phosphate
  modified_base 7: mod_base = OTHER; note = 2'-deoxy-2'-fluoroguanosine-3'-phosphate
  modified_base 8: mod_base = OTHER; note = 2'-O-methyluridine-3'-phosphate
  modified_base 9: mod_base = OTHER; note = 2'-deoxy-2'-fluorouridine-3'-phosphate
  modified_base 10: mod_base = OTHER; note = 2'-deoxy-2'-fluorocytidine-3'-phosphate
  modified_base 11: mod_base = OTHER; note = 2'-deoxy-2'-fluoroadenosine-3'-phosphate
  modified_base 12: mod_base = OTHER; note = 2'-O-methylguanosine-3'-phosphate
  modified_base 13: mod_base = OTHER; note = 2'-O-methylguanosine-3'-phosphate
  modified_base 14: mod_base = OTHER; note = 2'-O-methyladenosine-3'-phosphate
  modified_base 15: mod_base = OTHER; note = 2'-O-methyladenosine-3'-phosphate
  modified_base 16: mod_base = OTHER; note = 2'-O-methyladenosine-3'-phosphate
  modified_base 17: mod_base = OTHER; note = 2'-O-methyluridine-3'-phosphate
  modified_base 18: mod_base = OTHER; note = 2'-O-methyladenosine-3'-phosphate
  modified_base 19: mod_base = OTHER; note = 2'-O-methylguanosine-3'-phosphate
  modified_base 20: mod_base = OTHER; note = 2'-O-methyladenosine-3'-phosphate
  modified_base 21: mod_base = OTHER; note = 2'-O-methyladenosine
ccgcatgttcaggaaatagaa

SEQ ID NO: 4034 - RNA, 21 nt, synthetic construct
  source 1..21: mol_type = other RNA
  modified_base 1: mod_base = OTHER; note = 2'-O-methyluridine-3'-phosphate
  modified_base 2: mod_base = OTHER; note = 2'-O-methyluridine-3'-phosphate
  modified_base 3: mod_base = OTHER; note = 2'-O-methylguanosine-3'-phosphate
  modified_base 4: mod_base = OTHER; note = 2'-O-methylguanosine-3'-phosphate
  modified_base 5: mod_base = OTHER; note = 2'-O-methyladenosine-3'-phosphate
  modified_base 6: mod_base = OTHER; note = 2'-O-methylguanosine-3'-phosphate
  modified_base 7: mod_base = OTHER; note = 2'-deoxy-2'-fluorocytidine-3'-phosphate
  modified_base 8: mod_base = OTHER; note = 2'-O-methylcytidine-3'-phosphate
  modified_base 9: mod_base = OTHER; note = 2'-deoxy-2'-fluorocytidine-3'-phosphate
  modified_base 10: mod_base = OTHER; note = 2'-deoxy-2'-fluoroadenosine-3'-phosphate
  modified_base 11: mod_base = OTHER; note = 2'-deoxy-2'-fluorocytidine-3'-phosphate
  modified_base 12: mod_base = OTHER; note = 2'-O-methyladenosine-3'-phosphate
  modified_base 13: mod_base = OTHER; note = 2'-O-methylcytidine-3'-phosphate
  modified_base 14: mod_base = OTHER; note = 2'-O-methylguanosine-3'-phosphate
  modified_base 15: mod_base = OTHER; note = 2'-O-methyladenosine-3'-phosphate
  modified_base 16: mod_base = OTHER; note = 2'-O-methyladenosine-3'-phosphate
  modified_base 17: mod_base = OTHER; note = 2'-O-methyladenosine-3'-phosphate
  modified_base 18: mod_base = OTHER; note = 2'-O-methyladenosine-3'-phosphate
  modified_base 19: mod_base = OTHER; note = 2'-O-methylguanosine-3'-phosphate
  modified_base 20: mod_base = OTHER; note = 2'-O-methyladenosine-3'-phosphate
  modified_base 21: mod_base = OTHER; note = 2'-O-methyladenosine
ttggagcccacacgaaaagaa

SEQ ID NO: 4035 - RNA, 21 nt, synthetic construct
  source 1..21: mol_type = other RNA
  modified_base 1: mod_base = OTHER; note = 2'-O-methyluridine-3'-phosphate
  modified_base 2: mod_base = OTHER; note = 2'-O-methylguanosine-3'-phosphate
  modified_base 3: mod_base = OTHER; note = 2'-O-methylguanosine-3'-phosphate
  modified_base 4: mod_base = OTHER; note = 2'-O-methyladenosine-3'-phosphate
  modified_base 5: mod_base = OTHER; note = 2'-O-methylguanosine-3'-phosphate
  modified_base 6: mod_base = OTHER; note = 2'-O-methylcytidine-3'-phosphate
  modified_base 7: mod_base = OTHER; note = 2'-deoxy-2'-fluorocytidine-3'-phosphate
  modified_base 8: mod_base = OTHER; note = 2'-O-methylcytidine-3'-phosphate
  modified_base 9: mod_base = OTHER; note = 2'-deoxy-2'-fluoroadenosine-3'-phosphate
  modified_base 10: mod_base = OTHER; note = 2'-deoxy-2'-fluorocytidine-3'-phosphate
  modified_base 11: mod_base = OTHER; note = 2'-deoxy-2'-fluoroadenosine-3'-phosphate
  modified_base 12: mod_base = OTHER; note = 2'-O-methylcytidine-3'-phosphate
  modified_base 13: mod_base = OTHER; note = 2'-O-methylguanosine-3'-phosphate
  modified_base 14: mod_base = OTHER; note = 2'-O-methyladenosine-3'-phosphate
  modified_base 15: mod_base = OTHER; note = 2'-O-methyladenosine-3'-phosphate
  modified_base 16: mod_base = OTHER; note = 2'-O-methyladenosine-3'-phosphate
  modified_base 17: mod_base = OTHER; note = 2'-O-methyladenosine-3'-phosphate
  modified_base 18: mod_base = OTHER; note = 2'-O-methylguanosine-3'-phosphate
  modified_base 19: mod_base = OTHER; note = 2'-O-methyladenosine-3'-phosphate
  modified_base 20: mod_base = OTHER; note = 2'-O-methyluridine-3'-phosphate
  modified_base 21: mod_base = OTHER; note = 2'-O-methyladenosine
tggagcccacacgaaaagata

SEQ ID NO: 4036 - RNA, 21 nt, synthetic construct
  source 1..21: mol_type = other RNA
  modified_base 1: mod_base = OTHER; note = 2'-O-methylguanosine-3'-phosphate
  modified_base 2: mod_base = OTHER; note = 2'-O-methyladenosine-3'-phosphate
  modified_base 3: mod_base = OTHER; note = 2'-O-methylguanosine-3'-phosphate
  modified_base 4: mod_base = OTHER; note = 2'-O-methylcytidine-3'-phosphate
  modified_base 5: mod_base = OTHER; note = 2'-O-methylcytidine-3'-phosphate
  modified_base 6: mod_base = OTHER; note = 2'-O-methylcytidine-3'-phosphate
  modified_base 7: mod_base = OTHER; note = 2'-deoxy-2'-fluoroadenosine-3'-phosphate
  modified_base 8: mod_base = OTHER; note = 2'-O-methylcytidine-3'-phosphate
  modified_base 9: mod_base = OTHER; note = 2'-deoxy-2'-fluoroadenosine-3'-phosphate
  modified_base 10: mod_base = OTHER; note = 2'-deoxy-2'-fluorocytidine-3'-phosphate
  modified_base 11: mod_base = OTHER; note = 2'-deoxy-2'-fluoroguanosine-3'-phosphate
  modified_base 12: mod_base = OTHER; note = 2'-O-methyladenosine-3'-phosphate
  modified_base 13: mod_base = OTHER; note = 2'-O-methyladenosine-3'-phosphate
  modified_base 14: mod_base = OTHER; note = 2'-O-methyladenosine-3'-phosphate
  modified_base 15: mod_base = OTHER; note = 2'-O-methyladenosine-3'-phosphate
  modified_base 16: mod_base = OTHER; note = 2'-O-methylguanosine-3'-phosphate
  modified_base 17: mod_base = OTHER; note = 2'-O-methyladenosine-3'-phosphate
  modified_base 18: mod_base = OTHER; note = 2'-O-methyluridine-3'-phosphate
  modified_base 19: mod_base = OTHER; note = 2'-O-methyladenosine-3'-phosphate
  modified_base 20: mod_base = OTHER; note = 2'-O-methyluridine-3'-phosphate
  modified_base 21: mod_base = OTHER; note = 2'-O-methyladenosine
gagcccacacgaaaagatata

SEQ ID NO: 4037 - RNA, 21 nt, synthetic construct
  source 1..21: mol_type = other RNA
  modified_base 1: mod_base = OTHER; note = 2'-O-methyladenosine-3'-phosphate
  modified_base 2: mod_base = OTHER; note = 2'-O-methylguanosine-3'-phosphate
  modified_base 3: mod_base = OTHER; note = 2'-O-methylcytidine-3'-phosphate
  modified_base 4: mod_base = OTHER; note = 2'-O-methylcytidine-3'-phosphate
  modified_base 5: mod_base = OTHER; note = 2'-O-methylcytidine-3'-phosphate
  modified_base 6: mod_base = OTHER; note = 2'-O-methyladenosine-3'-phosphate
  modified_base 7: mod_base = OTHER; note = 2'-deoxy-2'-fluorocytidine-3'-phosphate
  modified_base 8: mod_base = OTHER; note = 2'-O-methyladenosine-3'-phosphate
  modified_base 9: mod_base = OTHER; note = 2'-deoxy-2'-fluorocytidine-3'-phosphate
  modified_base 10: mod_base = OTHER; note = 2'-deoxy-2'-fluoroguanosine-3'-phosphate
  modified_base 11: mod_base = OTHER; note = 2'-deoxy-2'-fluoroadenosine-3'-phosphate
  modified_base 12: mod_base = OTHER; note = 2'-O-methyladenosine-3'-phosphate
  modified_base 13: mod_base = OTHER; note = 2'-O-methyladenosine-3'-phosphate
  modified_base 14: mod_base = OTHER; note = 2'-O-methyladenosine-3'-phosphate
  modified_base 15: mod_base = OTHER; note = 2'-O-methylguanosine-3'-phosphate
  modified_base 16: mod_base = OTHER; note = 2'-O-methyladenosine-3'-phosphate
  modified_base 17: mod_base = OTHER; note = 2'-O-methyluridine-3'-phosphate
  modified_base 18: mod_base = OTHER; note = 2'-O-methyladenosine-3'-phosphate
  modified_base 19: mod_base = OTHER; note = 2'-O-methyluridine-3'-phosphate
  modified_base 20: mod_base = OTHER; note = 2'-O-methyluridine-3'-phosphate
  modified_base 21: mod_base = OTHER; note = 2'-O-methyladenosine
agcccacacgaaaagatatta

SEQ ID NO: 4038 - RNA, 21 nt, synthetic construct
  source 1..21: mol_type = other RNA
  modified_base 1: mod_base = OTHER; note = 2'-O-methylguanosine-3'-phosphate
  modified_base 2: mod_base = OTHER; note = 2'-O-methylcytidine-3'-phosphate
  modified_base 3: mod_base = OTHER; note = 2'-O-methylcytidine-3'-phosphate
  modified_base 4: mod_base = OTHER; note = 2'-O-methylcytidine-3'-phosphate
  modified_base 5: mod_base = OTHER; note = 2'-O-methyladenosine-3'-phosphate
  modified_base 6: mod_base = OTHER; note = 2'-O-methylcytidine-3'-phosphate
  modified_base 7: mod_base = OTHER; note = 2'-deoxy-2'-fluoroadenosine-3'-phosphate
  modified_base 8: mod_base = OTHER; note = 2'-O-methylcytidine-3'-phosphate
  modified_base 9: mod_base = OTHER; note = 2'-deoxy-2'-fluoroguanosine-3'-phosphate
  modified_base 10: mod_base = OTHER; note = 2'-deoxy-2'-fluoroadenosine-3'-phosphate
  modified_base 11: mod_base = OTHER; note = 2'-deoxy-2'-fluoroadenosine-3'-phosphate
  modified_base 12: mod_base = OTHER; note = 2'-O-methyladenosine-3'-phosphate
  modified_base 13: mod_base = OTHER; note = 2'-O-methyladenosine-3'-phosphate
  modified_base 14: mod_base = OTHER; note = 2'-O-methylguanosine-3'-phosphate
  modified_base 15: mod_base = OTHER; note = 2'-O-methyladenosine-3'-phosphate
  modified_base 16: mod_base = OTHER; note = 2'-O-methyluridine-3'-phosphate
  modified_base 17: mod_base = OTHER; note = 2'-O-methyladenosine-3'-phosphate
  modified_base 18: mod_base = OTHER; note = 2'-O-methyluridine-3'-phosphate
  modified_base 19: mod_base = OTHER; note = 2'-O-methyluridine-3'-phosphate
  modified_base 20: mod_base = OTHER; note = 2'-O-methylguanosine-3'-phosphate
  modified_base 21: mod_base = OTHER; note = 2'-O-methyladenosine
gcccacacgaaaagatattga

SEQ ID NO: 4039 - RNA, 21 nt, synthetic construct
  source 1..21: mol_type = other RNA
  modified_base 1: mod_base = OTHER; note = 2'-O-methylcytidine-3'-phosphate
  modified_base 2: mod_base = OTHER; note = 2'-O-methylcytidine-3'-phosphate
  modified_base 3: mod_base = OTHER; note = 2'-O-methylcytidine-3'-phosphate
  modified_base 4: mod_base = OTHER; note = 2'-O-methyladenosine-3'-phosphate
  modified_base 5: mod_base = OTHER; note = 2'-O-methylcytidine-3'-phosphate
  modified_base 6: mod_base = OTHER; note = 2'-O-methyladenosine-3'-phosphate
  modified_base 7: mod_base = OTHER; note = 2'-deoxy-2'-fluorocytidine-3'-phosphate
  modified_base 8: mod_base = OTHER; note = 2'-O-methylguanosine-3'-phosphate
  modified_base 9: mod_base = OTHER; note = 2'-deoxy-2'-fluoroadenosine-3'-phosphate
  modified_base 10: mod_base = OTHER; note = 2'-deoxy-2'-fluoroadenosine-3'-phosphate
  modified_base 11: mod_base = OTHER; note = 2'-deoxy-2'-fluoroadenosine-3'-phosphate
  modified_base 12: mod_base = OTHER; note = 2'-O-methyladenosine-3'-phosphate
  modified_base 13: mod_base = OTHER; note = 2'-O-methylguanosine-3'-phosphate
  modified_base 14: mod_base = OTHER; note = 2'-O-methyladenosine-3'-phosphate
  modified_base 15: mod_base = OTHER; note = 2'-O-methyluridine-3'-phosphate
  modified_base 16: mod_base = OTHER; note = 2'-O-methyladenosine-3'-phosphate
  modified_base 17: mod_base = OTHER; note = 2'-O-methyluridine-3'-phosphate
  modified_base 18: mod_base = OTHER; note = 2'-O-methyluridine-3'-phosphate
  modified_base 19: mod_base = OTHER; note = 2'-O-methylguanosine-3'-phosphate
  modified_base 20: mod_base = OTHER; note = 2'-O-methylcytidine-3'-phosphate
  modified_base 21: mod_base = OTHER; note = 2'-O-methyladenosine
cccacacgaaaagatattgca

SEQ ID NO: 4040 - RNA, 21 nt, synthetic construct
  source 1..21: mol_type = other RNA
  modified_base 1: mod_base = OTHER; note = 2'-O-methylcytidine-3'-phosphate
  modified_base 2: mod_base = OTHER; note = 2'-O-methylcytidine-3'-phosphate
  modified_base 3: mod_base = OTHER; note = 2'-O-methyladenosine-3'-phosphate
  modified_base 4: mod_base = OTHER; note = 2'-O-methylcytidine-3'-phosphate
  modified_base 5: mod_base = OTHER; note = 2'-O-methyladenosine-3'-phosphate
  modified_base 6: mod_base = OTHER; note = 2'-O-methylcytidine-3'-phosphate
  modified_base 7: mod_base = OTHER; note = 2'-deoxy-2'-fluoroguanosine-3'-phosphate
  modified_base 8: mod_base = OTHER; note = 2'-O-methyladenosine-3'-phosphate
  modified_base 9: mod_base = OTHER; note = 2'-deoxy-2'-fluoroadenosine-3'-phosphate
  modified_base 10: mod_base = OTHER; note = 2'-deoxy-2'-fluoroadenosine-3'-phosphate
  modified_base 11: mod_base = OTHER; note = 2'-deoxy-2'-fluoroadenosine-3'-phosphate
  modified_base 12: mod_base = OTHER; note = 2'-O-methylguanosine-3'-phosphate
  modified_base 13: mod_base = OTHER; note = 2'-O-methyladenosine-3'-phosphate
  modified_base 14: mod_base = OTHER; note = 2'-O-methyluridine-3'-phosphate
  modified_base 15: mod_base = OTHER; note = 2'-O-methyladenosine-3'-phosphate
  modified_base 16: mod_base = OTHER; note = 2'-O-methyluridine-3'-phosphate
  modified_base 17: mod_base = OTHER; note = 2'-O-methyluridine-3'-phosphate
  modified_base 18: mod_base = OTHER; note = 2'-O-methylguanosine-3'-phosphate
  modified_base 19: mod_base = OTHER; note = 2'-O-methylcytidine-3'-phosphate
  modified_base 20: mod_base = OTHER; note = 2'-O-methylcytidine-3'-phosphate
  modified_base 21: mod_base = OTHER; note = 2'-O-methyladenosine
ccacacgaaaagatattgcca

SEQ ID NO: 4041 - RNA, 21 nt, synthetic construct
  source 1..21: mol_type = other RNA
  modified_base 1: mod_base = OTHER; note = 2'-O-methylcytidine-3'-phosphate
  modified_base 2: mod_base = OTHER; note = 2'-O-methyladenosine-3'-phosphate
  modified_base 3: mod_base = OTHER; note = 2'-O-methylcytidine-3'-phosphate
  modified_base 4: mod_base = OTHER; note = 2'-O-methyladenosine-3'-phosphate
  modified_base 5: mod_base = OTHER; note = 2'-O-methylcytidine-3'-phosphate
  modified_base 6: mod_base = OTHER; note = 2'-O-methylguanosine-3'-phosphate
  modified_base 7: mod_base = OTHER; note = 2'-deoxy-2'-fluoroadenosine-3'-phosphate
  modified_base 8: mod_base = OTHER; note = 2'-O-methyladenosine-3'-phosphate
  modified_base 9: mod_base = OTHER; note = 2'-deoxy-2'-fluoroadenosine-3'-phosphate
  modified_base 10: mod_base = OTHER; note = 2'-deoxy-2'-fluoroadenosine-3'-phosphate
  modified_base 11: mod_base = OTHER; note = 2'-deoxy-2'-fluoroguanosine-3'-phosphate
  modified_base 12: mod_base = OTHER; note = 2'-O-methyladenosine-3'-phosphate
  modified_base 13: mod_base = OTHER; note = 2'-O-methyluridine-3'-phosphate
  modified_base 14: mod_base = OTHER; note = 2'-O-methyladenosine-3'-phosphate
  modified_base 15: mod_base = OTHER; note = 2'-O-methyluridine-3'-phosphate
  modified_base 16: mod_base = OTHER; note = 2'-O-methyluridine-3'-phosphate
  modified_base 17: mod_base = OTHER; note = 2'-O-methylguanosine-3'-phosphate
  modified_base 18: mod_base = OTHER; note = 2'-O-methylcytidine-3'-phosphate
  modified_base 19: mod_base = OTHER; note = 2'-O-methylcytidine-3'-phosphate
  modified_base 20: mod_base = OTHER; note = 2'-O-methyluridine-3'-phosphate
  modified_base 21: mod_base = OTHER; note = 2'-O-methyladenosine
cacacgaaaagatattgccta

SEQ ID NO: 4042 - RNA, 21 nt, synthetic construct
  source 1..21: mol_type = other RNA
  modified_base 1: mod_base = OTHER; note = 2'-O-methyladenosine-3'-phosphate
  modified_base 2: mod_base = OTHER; note = 2'-O-methylcytidine-3'-phosphate
  modified_base 3: mod_base = OTHER; note = 2'-O-methyladenosine-3'-phosphate
  modified_base 4: mod_base = OTHER; note = 2'-O-methylcytidine-3'-phosphate
  modified_base 5: mod_base = OTHER; note = 2'-O-methylguanosine-3'-phosphate
  modified_base 6: mod_base = OTHER; note = 2'-O-methyladenosine-3'-phosphate
  modified_base 7: mod_base = OTHER; note = 2'-deoxy-2'-fluoroadenosine-3'-phosphate
  modified_base 8: mod_base = OTHER; note = 2'-O-methyladenosine-3'-phosphate
  modified_base 9: mod_base = OTHER; note = 2'-deoxy-2'-fluoroadenosine-3'-phosphate
  modified_base 10: mod_base = OTHER; note = 2'-deoxy-2'-fluoroguanosine-3'-phosphate
  modified_base 11: mod_base = OTHER; note = 2'-deoxy-2'-fluoroadenosine-3'-phosphate
  modified_base 12: mod_base = OTHER; note = 2'-O-methyluridine-3'-phosphate
  modified_base 13: mod_base = OTHER; note = 2'-O-methyladenosine-3'-phosphate
  modified_base 14: mod_base = OTHER; note = 2'-O-methyluridine-3'-phosphate
  modified_base 15: mod_base = OTHER; note = 2'-O-methyluridine-3'-phosphate
  modified_base 16: mod_base = OTHER; note = 2'-O-methylguanosine-3'-phosphate
  modified_base 17: mod_base = OTHER; note = 2'-O-methylcytidine-3'-phosphate
  modified_base 18: mod_base = OTHER; note = 2'-O-methylcytidine-3'-phosphate
  modified_base 19: mod_base = OTHER; note = 2'-O-methyluridine-3'-phosphate
  modified_base 20: mod_base = OTHER; note = 2'-O-methyluridine-3'-phosphate
  modified_base 21: mod_base = OTHER; note = 2'-O-methyladenosine
acacgaaaagatattgcctta

SEQ ID NO: 4043 - RNA, 21 nt, synthetic construct
  source 1..21: mol_type = other RNA
  modified_base 1: mod_base = OTHER; note = 2'-O-methylcytidine-3'-phosphate
  modified_base 2: mod_base = OTHER; note = 2'-O-methyladenosine-3'-phosphate
  modified_base 3: mod_base = OTHER; note = 2'-O-methylcytidine-3'-phosphate
  modified_base 4: mod_base = OTHER; note = 2'-O-methylguanosine-3'-phosphate
  modified_base 5: mod_base = OTHER; note = 2'-O-methyladenosine-3'-phosphate
  modified_base 6: mod_base = OTHER; note = 2'-O-methyladenosine-3'-phosphate
  modified_base 7: mod_base = OTHER; note = 2'-deoxy-2'-fluoroadenosine-3'-phosphate
  modified_base 8: mod_base = OTHER; note = 2'-O-methyladenosine-3'-phosphate
  modified_base 9: mod_base = OTHER; note = 2'-deoxy-2'-fluoroguanosine-3'-phosphate
  modified_base 10: mod_base = OTHER; note = 2'-deoxy-2'-fluoroadenosine-3'-phosphate
  modified_base 11: mod_base = OTHER; note = 2'-deoxy-2'-fluorouridine-3'-phosphate
  modified_base 12: mod_base = OTHER; note = 2'-O-methyladenosine-3'-phosphate
  modified_base 13: mod_base = OTHER; note = 2'-O-methyluridine-3'-phosphate
  modified_base 14: mod_base = OTHER; note = 2'-O-methyluridine-3'-phosphate
  modified_base 15: mod_base = OTHER; note = 2'-O-methylguanosine-3'-phosphate
  modified_base 16: mod_base = OTHER; note = 2'-O-methylcytidine-3'-phosphate
  modified_base 17: mod_base = OTHER; note = 2'-O-methylcytidine-3'-phosphate
  modified_base 18: mod_base = OTHER; note = 2'-O-methyluridine-3'-phosphate
  modified_base 19: mod_base = OTHER; note = 2'-O-methyluridine-3'-phosphate
  modified_base 20: mod_base = OTHER; note = 2'-O-methylguanosine-3'-phosphate
  modified_base 21: mod_base = OTHER; note = 2'-O-methyladenosine
cacgaaaagatattgccttga

SEQ ID NO: 4044 - RNA, 21 nt, synthetic construct
  source 1..21: mol_type = other RNA
  modified_base 1: mod_base = OTHER; note = 2'-O-methyladenosine-3'-phosphate
  modified_base 2: mod_base = OTHER; note = 2'-O-methylcytidine-3'-phosphate
  modified_base 3: mod_base = OTHER; note = 2'-O-methylguanosine-3'-phosphate
  modified_base 4: mod_base = OTHER; note = 2'-O-methyladenosine-3'-phosphate
  modified_base 5: mod_base = OTHER; note = 2'-O-methyladenosine-3'-phosphate
  modified_base 6: mod_base = OTHER; note = 2'-O-methyladenosine-3'-phosphate
  modified_base 7: mod_base = OTHER; note = 2'-deoxy-2'-fluoroadenosine-3'-phosphate
  modified_base 8: mod_base = OTHER; note = 2'-O-methylguanosine-3'-phosphate
  modified_base 9: mod_base = OTHER; note = 2'-deoxy-2'-fluoroadenosine-3'-phosphate
  modified_base 10: mod_base = OTHER; note = 2'-deoxy-2'-fluorouridine-3'-phosphate
  modified_base 11: mod_base = OTHER; note = 2'-deoxy-2'-fluoroadenosine-3'-phosphate
  modified_base 12: mod_base = OTHER; note = 2'-O-methyluridine-3'-phosphate
  modified_base 13: mod_base = OTHER; note = 2'-O-methyluridine-3'-phosphate
  modified_base 14: mod_base = OTHER; note = 2'-O-methylguanosine-3'-phosphate
  modified_base 15: mod_base = OTHER; note = 2'-O-methylcytidine-3'-phosphate
  modified_base 16: mod_base = OTHER; note = 2'-O-methylcytidine-3'-phosphate
  modified_base 17: mod_base = OTHER; note = 2'-O-methyluridine-3'-phosphate
  modified_base 18: mod_base = OTHER; note = 2'-O-methyluridine-3'-phosphate
  modified_base 19: mod_base = OTHER; note = 2'-O-methylguanosine-3'-phosphate
  modified_base 20: mod_base = OTHER; note = 2'-O-methylcytidine-3'-phosphate
  modified_base 21: mod_base = OTHER; note = 2'-O-methyladenosine
acgaaaagatattgccttgca

SEQ ID NO: 4045 - RNA, 21 nt, synthetic construct
  source 1..21: mol_type = other RNA
  modified_base 1: mod_base = OTHER; note = 2'-O-methylcytidine-3'-phosphate
  modified_base 2: mod_base = OTHER; note = 2'-O-methylguanosine-3'-phosphate
  modified_base 3: mod_base = OTHER; note = 2'-O-methyladenosine-3'-phosphate
  modified_base 4: mod_base = OTHER; note = 2'-O-methyladenosine-3'-phosphate
  modified_base 5: mod_base = OTHER; note = 2'-O-methyladenosine-3'-phosphate
  modified_base 6: mod_base = OTHER; note = 2'-O-methyladenosine-3'-phosphate
  modified_base 7: mod_base = OTHER; note = 2'-deoxy-2'-fluoroguanosine-3'-phosphate
  modified_base 8: mod_base = OTHER; note = 2'-O-methyladenosine-3'-phosphate
  modified_base 9: mod_base = OTHER; note = 2'-deoxy-2'-fluorouridine-3'-phosphate
  modified_base 10: mod_base = OTHER; note = 2'-deoxy-2'-fluoroadenosine-3'-phosphate
  modified_base 11: mod_base = OTHER; note = 2'-deoxy-2'-fluorouridine-3'-phosphate
  modified_base 12: mod_base = OTHER; note = 2'-O-methyluridine-3'-phosphate
  modified_base 13: mod_base = OTHER; note = 2'-O-methylguanosine-3'-phosphate
  modified_base 14: mod_base = OTHER; note = 2'-O-methylcytidine-3'-phosphate
  modified_base 15: mod_base = OTHER; note = 2'-O-methylcytidine-3'-phosphate
  modified_base 16: mod_base = OTHER; note = 2'-O-methyluridine-3'-phosphate
  modified_base 17: mod_base = OTHER; note = 2'-O-methyluridine-3'-phosphate
  modified_base 18: mod_base = OTHER; note = 2'-O-methylguanosine-3'-phosphate
  modified_base 19: mod_base = OTHER; note = 2'-O-methylcytidine-3'-phosphate
  modified_base 20: mod_base = OTHER; note = 2'-O-methyluridine-3'-phosphate
  modified_base 21: mod_base = OTHER; note = 2'-O-methyladenosine
cgaaaagatattgccttgcta

SEQ ID NO: 4046 - RNA, 21 nt, synthetic construct
  source 1..21: mol_type = other RNA
  modified_base 1: mod_base = OTHER; note = 2'-O-methylguanosine-3'-phosphate
  modified_base 2: mod_base = OTHER; note = 2'-O-methyladenosine-3'-phosphate
  modified_base 3: mod_base = OTHER; note = 2'-O-methyladenosine-3'-phosphate
  modified_base 4: mod_base = OTHER; note = 2'-O-methyladenosine-3'-phosphate
  modified_base 5: mod_base = OTHER; note = 2'-O-methyladenosine-3'-phosphate
  modified_base 6: mod_base = OTHER; note = 2'-O-methylguanosine-3'-phosphate
  modified_base 7: mod_base = OTHER; note = 2'-deoxy-2'-fluoroadenosine-3'-phosphate
  modified_base 8: mod_base = OTHER; note = 2'-O-methyluridine-3'-phosphate
  modified_base 9: mod_base = OTHER; note = 2'-deoxy-2'-fluoroadenosine-3'-phosphate
  modified_base 10: mod_base = OTHER; note = 2'-deoxy-2'-fluorouridine-3'-phosphate
  modified_base 11: mod_base = OTHER; note = 2'-deoxy-2'-fluorouridine-3'-phosphate
  modified_base 12: mod_base = OTHER; note = 2'-O-methylguanosine-3'-phosphate
  modified_base 13: mod_base = OTHER; note = 2'-O-methylcytidine-3'-phosphate
  modified_base 14: mod_base = OTHER; note = 2'-O-methylcytidine-3'-phosphate
  modified_base 15: mod_base = OTHER; note = 2'-O-methyluridine-3'-phosphate
  modified_base 16: mod_base = OTHER; note = 2'-O-methyluridine-3'-phosphate
  modified_base 17: mod_base = OTHER; note = 2'-O-methylguanosine-3'-phosphate
  modified_base 18: mod_base = OTHER; note = 2'-O-methylcytidine-3'-phosphate
  modified_base 19: mod_base = OTHER; note = 2'-O-methyluridine-3'-phosphate
  modified_base 20: mod_base = OTHER; note = 2'-O-methyladenosine-3'-phosphate
  modified_base 21: mod_base = OTHER; note = 2'-O-methyladenosine
gaaaagatattgccttgctaa

SEQ ID NO: 4047 - RNA, 21 nt, synthetic construct
  source 1..21: mol_type = other RNA
  modified_base 1: mod_base = OTHER; note = 2'-O-methyladenosine-3'-phosphate
  modified_base 2: mod_base = OTHER; note = 2'-O-methyladenosine-3'-phosphate
  modified_base 3: mod_base = OTHER; note = 2'-O-methyladenosine-3'-phosphate
  modified_base 4: mod_base = OTHER; note = 2'-O-methyladenosine-3'-phosphate
  modified_base 5: mod_base = OTHER; note = 2'-O-methylguanosine-3'-phosphate
  modified_base 6: mod_base = OTHER; note = 2'-O-methyladenosine-3'-phosphate
  modified_base 7: mod_base = OTHER; note = 2'-deoxy-2'-fluorouridine-3'-phosphate
  modified_base 8: mod_base = OTHER; note = 2'-O-methyladenosine-3'-phosphate
  modified_base 9: mod_base = OTHER; note = 2'-deoxy-2'-fluorouridine-3'-phosphate
  modified_base 10: mod_base = OTHER; note = 2'-deoxy-2'-fluorouridine-3'-phosphate
  modified_base 11: mod_base = OTHER; note = 2'-deoxy-2'-fluoroguanosine-3'-phosphate
  modified_base 12: mod_base = OTHER; note = 2'-O-methylcytidine-3'-phosphate
  modified_base 13: mod_base = OTHER; note = 2'-O-methylcytidine-3'-phosphate
  modified_base 14: mod_base = OTHER; note = 2'-O-methyluridine-3'-phosphate
  modified_base 15: mod_base = OTHER; note = 2'-O-methyluridine-3'-phosphate
  modified_base 16: mod_base = OTHER; note = 2'-O-methylguanosine-3'-phosphate
  modified_base 17: mod_base = OTHER; note = 2'-O-methylcytidine-3'-phosphate
  modified_base 18: mod_base = OTHER; note = 2'-O-methyluridine-3'-phosphate
  modified_base 19: mod_base = OTHER; note = 2'-O-methyladenosine-3'-phosphate
  modified_base 20: mod_base = OTHER; note = 2'-O-methyladenosine-3'-phosphate
  modified_base 21: mod_base = OTHER; note = 2'-O-methyladenosine
aaaagatattgccttgctaaa

SEQ ID NO: 4048 - RNA, 21 nt, synthetic construct
  source 1..21: mol_type = other RNA
  modified_base 1: mod_base = OTHER; note = 2'-O-methyladenosine-3'-phosphate
  modified_base 2: mod_base = OTHER; note = 2'-O-methyladenosine-3'-phosphate
  modified_base 3: mod_base = OTHER; note = 2'-O-methyladenosine-3'-phosphate
  modified_base 4: mod_base = OTHER; note = 2'-O-methylguanosine-3'-phosphate
  modified_base 5: mod_base = OTHER; note = 2'-O-methyladenosine-3'-phosphate
  modified_base 6: mod_base = OTHER; note = 2'-O-methyluridine-3'-phosphate
  modified_base 7: mod_base = OTHER; note = 2'-deoxy-2'-fluoroadenosine-3'-phosphate
  modified_base 8: mod_base = OTHER; note = 2'-O-methyluridine-3'-phosphate
  modified_base 9: mod_base = OTHER; note = 2'-deoxy-2'-fluorouridine-3'-phosphate
  modified_base 10: mod_base = OTHER; note = 2'-deoxy-2'-fluoroguanosine-3'-phosphate
  modified_base 11: mod_base = OTHER; note = 2'-deoxy-2'-fluorocytidine-3'-phosphate
  modified_base 12: mod_base = OTHER; note = 2'-O-methylcytidine-3'-phosphate
  modified_base 13: mod_base = OTHER; note = 2'-O-methyluridine-3'-phosphate
  modified_base 14: mod_base = OTHER; note = 2'-O-methyluridine-3'-phosphate
  modified_base 15: mod_base = OTHER; note = 2'-O-methylguanosine-3'-phosphate
  modified_base 16: mod_base = OTHER; note = 2'-O-methylcytidine-3'-phosphate
  modified_base 17: mod_base = OTHER; note = 2'-O-methyluridine-3'-phosphate
  modified_base 18: mod_base = OTHER; note = 2'-O-methyladenosine-3'-phosphate
  modified_base 19: mod_base = OTHER; note = 2'-O-methyladenosine-3'-phosphate
  modified_base 20: mod_base = OTHER; note = 2'-O-methyladenosine-3'-phosphate
  modified_base 21: mod_base = OTHER; note = 2'-O-methyladenosine
aaagatattgccttgctaaaa

SEQ ID NO: 4049 - RNA, 21 nt, synthetic construct
  source 1..21: mol_type = other RNA
  modified_base 1: mod_base = OTHER; note = 2'-O-methyladenosine-3'-phosphate
  modified_base 2: mod_base = OTHER; note = 2'-O-methyladenosine-3'-phosphate
  modified_base 3: mod_base = OTHER; note = 2'-O-methylguanosine-3'-phosphate
  modified_base 4: mod_base = OTHER; note = 2'-O-methyladenosine-3'-phosphate
  modified_base 5: mod_base = OTHER; note = 2'-O-methyluridine-3'-phosphate
  modified_base 6: mod_base = OTHER; note = 2'-O-methyladenosine-3'-phosphate
  modified_base 7: mod_base = OTHER; note = 2'-deoxy-2'-fluorouridine-3'-phosphate
  modified_base 8: mod_base = OTHER; note = 2'-O-methyluridine-3'-phosphate
  modified_base 9: mod_base = OTHER; note = 2'-deoxy-2'-fluoroguanosine-3'-phosphate
  modified_base 10: mod_base = OTHER; note = 2'-deoxy-2'-fluorocytidine-3'-phosphate
  modified_base 11: mod_base = OTHER; note = 2'-deoxy-2'-fluorocytidine-3'-phosphate
  modified_base 12: mod_base = OTHER; note = 2'-O-methyluridine-3'-phosphate
  modified_base 13: mod_base = OTHER; note = 2'-O-methyluridine-3'-phosphate
  modified_base 14: mod_base = OTHER; note = 2'-O-methylguanosine-3'-phosphate
  modified_base 15: mod_base = OTHER; note = 2'-O-methylcytidine-3'-phosphate
  modified_base 16: mod_base = OTHER; note = 2'-O-methyluridine-3'-phosphate
  modified_base 17: mod_base = OTHER; note = 2'-O-methyladenosine-3'-phosphate
  modified_base 18: mod_base = OTHER; note = 2'-O-methyladenosine-3'-phosphate
  modified_base 19: mod_base = OTHER; note = 2'-O-methyladenosine-3'-phosphate
  modified_base 20: mod_base = OTHER; note = 2'-O-methylguanosine-3'-phosphate
  modified_base 21: mod_base = OTHER; note = 2'-O-methyladenosine
aagatattgccttgctaaaga

SEQ ID NO: 4050 - RNA, 21 nt, synthetic construct
  source 1..21: mol_type = other RNA
  modified_base 1: mod_base = OTHER; note = 2'-O-methyladenosine-3'-phosphate
  modified_base 2: mod_base = OTHER; note = 2'-O-methylguanosine-3'-phosphate
  modified_base 3: mod_base = OTHER; note = 2'-O-methyladenosine-3'-phosphate
  modified_base 4: mod_base = OTHER; note = 2'-O-methyluridine-3'-phosphate
  modified_base 5: mod_base = OTHER; note = 2'-O-methyladenosine-3'-phosphate
  modified_base 6: mod_base = OTHER; note = 2'-O-methyluridine-3'-phosphate
  modified_base 7: mod_base = OTHER; note = 2'-deoxy-2'-fluorouridine-3'-phosphate
  modified_base 8: mod_base = OTHER; note = 2'-O-methylguanosine-3'-phosphate
  modified_base 9: mod_base = OTHER; note = 2'-deoxy-2'-fluorocytidine-3'-phosphate
  modified_base 10: mod_base = OTHER; note = 2'-deoxy-2'-fluorocytidine-3'-phosphate
  modified_base 11: mod_base = OTHER; note = 2'-deoxy-2'-fluorouridine-3'-phosphate
  modified_base 12: mod_base = OTHER; note = 2'-O-methyluridine-3'-phosphate
  modified_base 13: mod_base = OTHER; note = 2'-O-methylguanosine-3'-phosphate
  modified_base 14: mod_base = OTHER; note = 2'-O-methylcytidine-3'-phosphate
  modified_base 15: mod_base = OTHER; note = 2'-O-methyluridine-3'-phosphate
  modified_base 16: mod_base = OTHER; note = 2'-O-methyladenosine-3'-phosphate
  modified_base 17: mod_base = OTHER; note = 2'-O-methyladenosine-3'-phosphate
  modified_base 18: mod_base = OTHER; note = 2'-O-methyladenosine-3'-phosphate
  modified_base 19: mod_base = OTHER; note = 2'-O-methylguanosine-3'-phosphate
  modified_base 20: mod_base = OTHER; note = 2'-O-methylcytidine-3'-phosphate
  modified_base 21: mod_base = OTHER; note = 2'-O-methyladenosine
agatattgccttgctaaagca

SEQ ID NO: 4051 - RNA, 21 nt, synthetic construct
  source 1..21: mol_type = other RNA
  modified_base 1: mod_base = OTHER; note = 2'-O-methylguanosine-3'-phosphate
  modified_base 2: mod_base = OTHER; note = 2'-O-methyladenosine-3'-phosphate
  modified_base 3: mod_base = OTHER; note = 2'-O-methyluridine-3'-phosphate
  modified_base 4: mod_base = OTHER; note = 2'-O-methyladenosine-3'-phosphate
  modified_base 5: mod_base = OTHER; note = 2'-O-methyluridine-3'-phosphate
  modified_base 6: mod_base = OTHER; note = 2'-O-methyluridine-3'-phosphate
  modified_base 7: mod_base = OTHER; note = 2'-deoxy-2'-fluoroguanosine-3'-phosphate
  modified_base 8: mod_base = OTHER; note = 2'-O-methylcytidine-3'-phosphate
  modified_base 9: mod_base = OTHER; note = 2'-deoxy-2'-fluorocytidine-3'-phosphate
  modified_base 10: mod_base = OTHER; note = 2'-deoxy-2'-fluorouridine-3'-phosphate
  modified_base 11: mod_base = OTHER; note = 2'-deoxy-2'-fluorouridine-3'-phosphate
  modified_base 12: mod_base = OTHER; note = 2'-O-methylguanosine-3'-phosphate
  modified_base 13: mod_base = OTHER; note = 2'-O-methylcytidine-3'-phosphate
  modified_base 14: mod_base = OTHER; note = 2'-O-methyluridine-3'-phosphate
  modified_base 15: mod_base = OTHER; note = 2'-O-methyladenosine-3'-phosphate
  modified_base 16: mod_base = OTHER; note = 2'-O-methyladenosine-3'-phosphate
  modified_base 17: mod_base = OTHER; note = 2'-O-methyladenosine-3'-phosphate
  modified_base 18: mod_base = OTHER; note = 2'-O-methylguanosine-3'-phosphate
  modified_base 19: mod_base = OTHER; note = 2'-O-methylcytidine-3'-phosphate
  modified_base 20: mod_base = OTHER; note = 2'-O-methyluridine-3'-phosphate
  modified_base 21: mod_base = OTHER; note = 2'-O-methyladenosine
gatattgccttgctaaagcta

SEQ ID NO: 4052 - RNA, 21 nt, synthetic construct
  source 1..21: mol_type = other RNA
  modified_base 1: mod_base = OTHER; note = 2'-O-methyladenosine-3'-phosphate
  modified_base 2: mod_base = OTHER; note = 2'-O-methyluridine-3'-phosphate
  modified_base 3: mod_base = OTHER; note = 2'-O-methyladenosine-3'-phosphate
  modified_base 4: mod_base = OTHER; note = 2'-O-methyluridine-3'-phosphate
  modified_base 5: mod_base = OTHER; note = 2'-O-methyluridine-3'-phosphate
  modified_base 6: mod_base = OTHER; note = 2'-O-methylguanosine-3'-phosphate
  modified_base 7: mod_base = OTHER; note = 2'-deoxy-2'-fluorocytidine-3'-phosphate
  modified_base 8: mod_base = OTHER; note = 2'-O-methylcytidine-3'-phosphate
  modified_base 9: mod_base = OTHER; note = 2'-deoxy-2'-fluorouridine-3'-phosphate
  modified_base 10: mod_base = OTHER; note = 2'-deoxy-2'-fluorouridine-3'-phosphate
  modified_base 11: mod_base = OTHER; note = 2'-deoxy-2'-fluoroguanosine-3'-phosphate
  modified_base 12: mod_base = OTHER; note = 2'-O-methylcytidine-3'-phosphate
  modified_base 13: mod_base = OTHER; note = 2'-O-methyluridine-3'-phosphate
  modified_base 14: mod_base = OTHER; note = 2'-O-methyladenosine-3'-phosphate
  modified_base 15: mod_base = OTHER; note = 2'-O-methyladenosine-3'-phosphate
  modified_base 16: mod_base = OTHER; note = 2'-O-methyladenosine-3'-phosphate
  modified_base 17: mod_base = OTHER; note = 2'-O-methylguanosine-3'-phosphate
  modified_base 18: mod_base = OTHER; note = 2'-O-methylcytidine-3'-phosphate
  modified_base 19: mod_base = OTHER; note = 2'-O-methyluridine-3'-phosphate
  modified_base 20: mod_base = OTHER; note = 2'-O-methyladenosine-3'-phosphate
  modified_base 21: mod_base = OTHER; note = 2'-O-methyladenosine
atattgccttgctaaagctaa

SEQ ID NO: 4053 - RNA, 21 nt, synthetic construct
  source 1..21: mol_type = other RNA
  modified_base 1: mod_base = OTHER; note = 2'-O-methyluridine-3'-phosphate
  modified_base 2: mod_base = OTHER; note = 2'-O-methyladenosine-3'-phosphate
  modified_base 3: mod_base = OTHER; note = 2'-O-methyluridine-3'-phosphate
  modified_base 4: mod_base = OTHER; note = 2'-O-methyluridine-3'-phosphate
  modified_base 5: mod_base = OTHER; note = 2'-O-methylguanosine-3'-phosphate
  modified_base 6: mod_base = OTHER; note = 2'-O-methylcytidine-3'-phosphate
  modified_base 7: mod_base = OTHER; note = 2'-deoxy-2'-fluorocytidine-3'-phosphate
  modified_base 8: mod_base = OTHER; note = 2'-O-methyluridine-3'-phosphate
  modified_base 9: mod_base = OTHER; note = 2'-deoxy-2'-fluorouridine-3'-phosphate
  modified_base 10: mod_base = OTHER; note = 2'-deoxy-2'-fluoroguanosine-3'-phosphate
  modified_base 11: mod_base = OTHER; note = 2'-deoxy-2'-fluorocytidine-3'-phosphate
  modified_base 12: mod_base = OTHER; note = 2'-O-methyluridine-3'-phosphate
  modified_base 13: mod_base = OTHER; note = 2'-O-methyladenosine-3'-phosphate
  modified_base 14: mod_base = OTHER; note = 2'-O-methyladenosine-3'-phosphate
  modified_base 15: mod_base = OTHER; note = 2'-O-methyladenosine-3'-phosphate
  modified_base 16: mod_base = OTHER; note = 2'-O-methylguanosine-3'-phosphate
  modified_base 17: mod_base = OTHER; note = 2'-O-methylcytidine-3'-phosphate
  modified_base 18: mod_base = OTHER; note = 2'-O-methyluridine-3'-phosphate
  modified_base 19: mod_base = OTHER; note = 2'-O-methyladenosine-3'-phosphate
  modified_base 20: mod_base = OTHER; note = 2'-O-methyladenosine-3'-phosphate
  modified_base 21: mod_base = OTHER; note = 2'-O-methyladenosine
tattgccttgctaaagctaaa

SEQ ID NO: 4054 - RNA, 21 nt, synthetic construct
  source 1..21: mol_type = other RNA
  modified_base 1: mod_base = OTHER; note = 2'-O-methylcytidine-3'-phosphate
  modified_base 2: mod_base = OTHER; note = 2'-O-methylcytidine-3'-phosphate
  modified_base 3: mod_base = OTHER; note = 2'-O-methyluridine-3'-phosphate
  modified_base 4: mod_base = OTHER; note = 2'-O-methyluridine-3'-phosphate
  modified_base 5: mod_base = OTHER; note = 2'-O-methylguanosine-3'-phosphate
  modified_base 6: mod_base = OTHER; note = 2'-O-methylcytidine-3'-phosphate
  modified_base 7: mod_base = OTHER; note = 2'-deoxy-2'-fluorouridine-3'-phosphate
  modified_base 8: mod_base = OTHER; note = 2'-O-methyladenosine-3'-phosphate
  modified_base 9: mod_base = OTHER; note = 2'-deoxy-2'-fluoroadenosine-3'-phosphate
  modified_base 10: mod_base = OTHER; note = 2'-deoxy-2'-fluoroadenosine-3'-phosphate
  modified_base 11: mod_base = OTHER; note = 2'-deoxy-2'-fluoroguanosine-3'-phosphate
  modified_base 12: mod_base = OTHER; note = 2'-O-methylcytidine-3'-phosphate
  modified_base 13: mod_base = OTHER; note = 2'-O-methyluridine-3'-phosphate
  modified_base 14: mod_base = OTHER; note = 2'-O-methyladenosine-3'-phosphate
  modified_base 15: mod_base = OTHER; note = 2'-O-methyladenosine-3'-phosphate
  modified_base 16: mod_base = OTHER; note = 2'-O-methylguanosine-3'-phosphate
  modified_base 17: mod_base = OTHER; note = 2'-O-methylcytidine-3'-phosphate
  modified_base 18: mod_base = OTHER; note = 2'-O-methyladenosine-3'-phosphate
  modified_base 19: mod_base = OTHER; note = 2'-O-methylguanosine-3'-phosphate
  modified_base 20: mod_base = OTHER; note = 2'-O-methyluridine-3'-phosphate
  modified_base 21: mod_base = OTHER; note = 2'-O-methyladenosine
ccttgctaaagctaagcagta

SEQ ID NO: 4055 - RNA, 21 nt, synthetic construct
  source 1..21: mol_type = other RNA
  modified_base 1: mod_base = OTHER; note = 2'-O-methylcytidine-3'-phosphate
  modified_base 2: mod_base = OTHER; note = 2'-O-methyluridine-3'-phosphate
  modified_base 3: mod_base = OTHER; note = 2'-O-methyluridine-3'-phosphate
  modified_base 4: mod_base = OTHER; note = 2'-O-methylguanosine-3'-phosphate
  modified_base 5: mod_base = OTHER; note = 2'-O-methylcytidine-3'-phosphate
  modified_base 6: mod_base = OTHER; note = 2'-O-methyluridine-3'-phosphate
  modified_base 7: mod_base = OTHER; note = 2'-deoxy-2'-fluoroadenosine-3'-phosphate
  modified_base 8: mod_base = OTHER; note = 2'-O-methyladenosine-3'-phosphate
  modified_base 9: mod_base = OTHER; note = 2'-deoxy-2'-fluoroadenosine-3'-phosphate
  modified_base 10: mod_base = OTHER; note = 2'-deoxy-2'-fluoroguanosine-3'-phosphate
  modified_base 11: mod_base = OTHER; note = 2'-deoxy-2'-fluorocytidine-3'-phosphate
  modified_base 12: mod_base = OTHER; note = 2'-O-methyluridine-3'-phosphate
  modified_base 13: mod_base = OTHER; note = 2'-O-methyladenosine-3'-phosphate
  modified_base 14: mod_base = OTHER; note = 2'-O-methyladenosine-3'-phosphate
  modified_base 15: mod_base = OTHER; note = 2'-O-methylguanosine-3'-phosphate
  modified_base 16: mod_base = OTHER; note = 2'-O-methylcytidine-3'-phosphate
  modified_base 17: mod_base = OTHER; note = 2'-O-methyladenosine-3'-phosphate
  modified_base 18: mod_base = OTHER; note = 2'-O-methylguanosine-3'-phosphate
  modified_base 19: mod_base = OTHER; note = 2'-O-methyluridine-3'-phosphate
  modified_base 20: mod_base = OTHER; note = 2'-O-methylcytidine-3'-phosphate
  modified_base 21: mod_base = OTHER; note = 2'-O-methyladenosine
cttgctaaagctaagcagtca

SEQ ID NO: 4056 - RNA, 21 nt, synthetic construct
  source 1..21: mol_type = other RNA
  modified_base 1: mod_base = OTHER; note = 2'-O-methyluridine-3'-phosphate
  modified_base 2: mod_base = OTHER; note = 2'-O-methylguanosine-3'-phosphate
  modified_base 3: mod_base = OTHER; note = 2'-O-methylcytidine-3'-phosphate
  modified_base 4: mod_base = OTHER; note = 2'-O-methyluridine-3'-phosphate
  modified_base 5: mod_base = OTHER; note = 2'-O-methyladenosine-3'-phosphate
  modified_base 6: mod_base = OTHER; note = 2'-O-methyladenosine-3'-phosphate
  modified_base 7: mod_base = OTHER; note = 2'-deoxy-2'-fluoroadenosine-3'-phosphate
  modified_base 8: mod_base = OTHER; note = 2'-O-methylguanosine-3'-phosphate
  modified_base 9: mod_base = OTHER; note = 2'-deoxy-2'-fluorocytidine-3'-phosphate
  modified_base 10: mod_base = OTHER; note = 2'-deoxy-2'-fluorouridine-3'-phosphate
  modified_base 11: mod_base = OTHER; note = 2'-deoxy-2'-fluoroadenosine-3'-phosphate
  modified_base 12: mod_base = OTHER; note = 2'-O-methyladenosine-3'-phosphate
  modified_base 13: mod_base = OTHER; note = 2'-O-methylguanosine-3'-phosphate
  modified_base 14: mod_base = OTHER; note = 2'-O-methylcytidine-3'-phosphate
  modified_base 15: mod_base = OTHER; note = 2'-O-methyladenosine-3'-phosphate
  modified_base 16: mod_base = OTHER; note = 2'-O-methylguanosine-3'-phosphate
  modified_base 17: mod_base = OTHER; note = 2'-O-methyluridine-3'-phosphate
  modified_base 18: mod_base = OTHER; note = 2'-O-methylcytidine-3'-phosphate
  modified_base 19: mod_base = OTHER; note = 2'-O-methylcytidine-3'-phosphate
  modified_base 20: mod_base = OTHER; note = 2'-O-methyluridine-3'-phosphate
  modified_base 21: mod_base = OTHER; note = 2'-O-methyladenosine
tgctaaagctaagcagtccta

SEQ ID NO: 4057 - RNA, 21 nt, synthetic construct
  source 1..21: mol_type = other RNA
  modified_base 1: mod_base = OTHER; note = 2'-O-methylcytidine-3'-phosphate
  modified_base 2: mod_base = OTHER; note = 2'-O-methyluridine-3'-phosphate
  modified_base 3: mod_base = OTHER; note = 2'-O-methyladenosine-3'-phosphate
  modified_base 4: mod_base = OTHER; note = 2'-O-methyladenosine-3'-phosphate
  modified_base 5: mod_base = OTHER; note = 2'-O-methylguanosine-3'-phosphate
  modified_base 6: mod_base = OTHER; note = 2'-O-methylcytidine-3'-phosphate
  modified_base 7: mod_base = OTHER; note = 2'-deoxy-2'-fluoroadenosine-3'-phosphate
  modified_base 8: mod_base = OTHER; note = 2'-O-methylguanosine-3'-phosphate
  modified_base 9: mod_base = OTHER; note = 2'-deoxy-2'-fluorouridine-3'-phosphate
  modified_base 10: mod_base = OTHER; note = 2'-deoxy-2'-fluorocytidine-3'-phosphate
  modified_base 11: mod_base = OTHER; note = 2'-deoxy-2'-fluorocytidine-3'-phosphate
  modified_base 12: mod_base = OTHER; note = 2'-O-methyluridine-3'-phosphate
  modified_base 13: mod_base = OTHER; note = 2'-O-methylguanosine-3'-phosphate
  modified_base 14: mod_base = OTHER; note = 2'-O-methylcytidine-3'-phosphate
  modified_base 15: mod_base = OTHER; note = 2'-O-methylcytidine-3'-phosphate
  modified_base 16: mod_base = OTHER; note = 2'-O-methylguanosine-3'-phosphate
  modified_base 17: mod_base = OTHER; note = 2'-O-methyluridine-3'-phosphate
  modified_base 18: mod_base = OTHER; note = 2'-O-methylcytidine-3'-phosphate
  modified_base 19: mod_base = OTHER; note = 2'-O-methyladenosine-3'-phosphate
  modified_base 20: mod_base = OTHER; note = 2'-O-methyluridine-3'-phosphate
  modified_base 21: mod_base = OTHER; note = 2'-O-methyladenosine
ctaagcagtcctgccgtcata

SEQ ID NO: 4058 - RNA, 21 nt, synthetic construct
  source 1..21: mol_type = other RNA
  modified_base 1: mod_base = OTHER; note = 2'-O-methyladenosine-3'-phosphate
  modified_base 2: mod_base = OTHER; note = 2'-O-methylguanosine-3'-phosphate
  modified_base 3: mod_base = OTHER; note = 2'-O-methylcytidine-3'-phosphate
  modified_base 4: mod_base = OTHER; note = 2'-O-methyladenosine-3'-phosphate
  modified_base 5: mod_base = OTHER; note = 2'-O-methylguanosine-3'-phosphate
  modified_base 6: mod_base = OTHER; note = 2'-O-methyluridine-3'-phosphate
  modified_base 7: mod_base = OTHER; note = 2'-deoxy-2'-fluorocytidine-3'-phosphate
  modified_base 8: mod_base = OTHER; note = 2'-O-methylcytidine-3'-phosphate
  modified_base 9: mod_base = OTHER; note = 2'-deoxy-2'-fluorouridine-3'-phosphate
  modified_base 10: mod_base = OTHER; note = 2'-deoxy-2'-fluoroguanosine-3'-phosphate
  modified_base 11: mod_base = OTHER; note = 2'-deoxy-2'-fluorocytidine-3'-phosphate
  modified_base 12: mod_base = OTHER; note = 2'-O-methylcytidine-3'-phosphate
  modified_base 13: mod_base = OTHER; note = 2'-O-methylguanosine-3'-phosphate
  modified_base 14: mod_base = OTHER; note = 2'-O-methyluridine-3'-phosphate
  modified_base 15: mod_base = OTHER; note = 2'-O-methylcytidine-3'-phosphate
  modified_base 16: mod_base = OTHER; note = 2'-O-methyladenosine-3'-phosphate
  modified_base 17: mod_base = OTHER; note = 2'-O-methyluridine-3'-phosphate
  modified_base 18: mod_base = OTHER; note = 2'-O-methylcytidine-3'-phosphate
  modified_base 19: mod_base = OTHER; note = 2'-O-methyladenosine-3'-phosphate
  modified_base 20: mod_base = OTHER; note = 2'-O-methylcytidine-3'-phosphate
  modified_base 21: mod_base = OTHER; note = 2'-O-methyladenosine
agcagtcctgccgtcatcaca

SEQ ID NO: 4059 - RNA, 21 nt, synthetic construct
  source 1..21: mol_type = other RNA
  modified_base 1: mod_base = OTHER; note = 2'-O-methylguanosine-3'-phosphate
  modified_base 2: mod_base = OTHER; note = 2'-O-methylcytidine-3'-phosphate
  modified_base 3: mod_base = OTHER; note = 2'-O-methyladenosine-3'-phosphate
  modified_base 4: mod_base = OTHER; note = 2'-O-methylguanosine-3'-phosphate
  modified_base 5: mod_base = OTHER; note = 2'-O-methyluridine-3'-phosphate
  modified_base 6: mod_base = OTHER; note = 2'-O-methylcytidine-3'-phosphate
  modified_base 7: mod_base = OTHER; note = 2'-deoxy-2'-fluorocytidine-3'-phosphate
  modified_base 8: mod_base = OTHER; note = 2'-O-methyluridine-3'-phosphate
  modified_base 9: mod_base = OTHER; note = 2'-deoxy-2'-fluoroguanosine-3'-phosphate
  modified_base 10: mod_base = OTHER; note = 2'-deoxy-2'-fluorocytidine-3'-phosphate
  modified_base 11: mod_base = OTHER; note = 2'-deoxy-2'-fluorocytidine-3'-phosphate
  modified_base 12: mod_base = OTHER; note = 2'-O-methylguanosine-3'-phosphate
  modified_base 13: mod_base = OTHER; note = 2'-O-methyluridine-3'-phosphate
  modified_base 14: mod_base = OTHER; note = 2'-O-methylcytidine-3'-phosphate
  modified_base 15: mod_base = OTHER; note = 2'-O-methyladenosine-3'-phosphate
  modified_base 16: mod_base = OTHER; note = 2'-O-methyluridine-3'-phosphate
  modified_base 17: mod_base = OTHER; note = 2'-O-methylcytidine-3'-phosphate
  modified_base 18: mod_base = OTHER; note = 2'-O-methyladenosine-3'-phosphate
  modified_base 19: mod_base = OTHER; note = 2'-O-methylcytidine-3'-phosphate
  modified_base 20: mod_base = OTHER; note = 2'-O-methyluridine-3'-phosphate
  modified_base 21: mod_base = OTHER; note = 2'-O-methyladenosine
gcagtcctgccgtcatcacta

SEQ ID NO: 4060 - RNA, 21 nt, synthetic construct
  source 1..21: mol_type = other RNA
  modified_base 1: mod_base = OTHER; note = 2'-O-methylcytidine-3'-phosphate
  modified_base 2: mod_base = OTHER; note = 2'-O-methyladenosine-3'-phosphate
  modified_base 3: mod_base = OTHER; note = 2'-O-methylguanosine-3'-phosphate
  modified_base 4: mod_base = OTHER; note = 2'-O-methyluridine-3'-phosphate
  modified_base 5: mod_base = OTHER; note = 2'-O-methylcytidine-3'-phosphate
  modified_base 6: mod_base = OTHER; note = 2'-O-methylcytidine-3'-phosphate
  modified_base 7: mod_base = OTHER; note = 2'-deoxy-2'-fluorouridine-3'-phosphate
  modified_base 8: mod_base = OTHER; note = 2'-O-methylguanosine-3'-phosphate
  modified_base 9: mod_base = OTHER; note = 2'-deoxy-2'-fluorocytidine-3'-phosphate
  modified_base 10: mod_base = OTHER; note = 2'-deoxy-2'-fluorocytidine-3'-phosphate
  modified_base 11: mod_base = OTHER; note = 2'-deoxy-2'-fluoroguanosine-3'-phosphate
  modified_base 12: mod_base = OTHER; note = 2'-O-methyluridine-3'-phosphate
  modified_base 13: mod_base = OTHER; note = 2'-O-methylcytidine-3'-phosphate
  modified_base 14: mod_base = OTHER; note = 2'-O-methyladenosine-3'-phosphate
  modified_base 15: mod_base = OTHER; note = 2'-O-methyluridine-3'-phosphate
  modified_base 16: mod_base = OTHER; note = 2'-O-methylcytidine-3'-phosphate
  modified_base 17: mod_base = OTHER; note = 2'-O-methyladenosine-3'-phosphate
  modified_base 18: mod_base = OTHER; note = 2'-O-methylcytidine-3'-phosphate
  modified_base 19: mod_base = OTHER; note = 2'-O-methyluridine-3'-phosphate
  modified_base 20: mod_base = OTHER; note = 2'-O-methylguanosine-3'-phosphate
  modified_base 21: mod_base = OTHER; note = 2'-O-methyladenosine
cagtcctgccgtcatcactga

SEQ ID NO: 4061 - RNA, 21 nt, synthetic construct
  source 1..21: mol_type = other RNA
  modified_base 1: mod_base = OTHER; note = 2'-O-methyluridine-3'-phosphate
  modified_base 2: mod_base = OTHER; note = 2'-O-methylcytidine-3'-phosphate
  modified_base 3: mod_base = OTHER; note = 2'-O-methyladenosine-3'-phosphate
  modified_base 4: mod_base = OTHER; note = 2'-O-methyluridine-3'-phosphate
  modified_base 5: mod_base = OTHER; note = 2'-O-methylcytidine-3'-phosphate
  modified_base 6: mod_base = OTHER; note = 2'-O-methyladenosine-3'-phosphate
  modified_base 7: mod_base = OTHER; note = 2'-deoxy-2'-fluorocytidine-3'-phosphate
  modified_base 8: mod_base = OTHER; note = 2'-O-methyluridine-3'-phosphate
  modified_base 9: mod_base = OTHER; note = 2'-deoxy-2'-fluoroguanosine-3'-phosphate
  modified_base 10: mod_base = OTHER; note = 2'-deoxy-2'-fluoroadenosine-3'-phosphate
  modified_base 11: mod_base = OTHER; note = 2'-deoxy-2'-fluorocytidine-3'-phosphate
  modified_base 12: mod_base = OTHER; note = 2'-O-methyladenosine-3'-phosphate
  modified_base 13: mod_base = OTHER; note = 2'-O-methyladenosine-3'-phosphate
  modified_base 14: mod_base = OTHER; note = 2'-O-methyladenosine-3'-phosphate
  modified_base 15: mod_base = OTHER; note = 2'-O-methylguanosine-3'-phosphate
  modified_base 16: mod_base = OTHER; note = 2'-O-methyluridine-3'-phosphate
  modified_base 17: mod_base = OTHER; note = 2'-O-methyladenosine-3'-phosphate
  modified_base 18: mod_base = OTHER; note = 2'-O-methyladenosine-3'-phosphate
  modified_base 19: mod_base = OTHER; note = 2'-O-methyluridine-3'-phosphate
  modified_base 20: mod_base = OTHER; note = 2'-O-methylcytidine-3'-phosphate
  modified_base 21: mod_base = OTHER; note = 2'-O-methyladenosine
tcatcactgacaaagtaatca

SEQ ID NO: 4062 - RNA, 21 nt, synthetic construct
  source 1..21: mol_type = other RNA
  modified_base 1: mod_base = OTHER; note = 2'-O-methylcytidine-3'-phosphate
  modified_base 2: mod_base = OTHER; note = 2'-O-methyladenosine-3'-phosphate
  modified_base 3: mod_base = OTHER; note = 2'-O-methyluridine-3'-phosphate
  modified_base 4: mod_base = OTHER; note = 2'-O-methylcytidine-3'-phosphate
  modified_base 5: mod_base = OTHER; note = 2'-O-methyladenosine-3'-phosphate
  modified_base 6: mod_base = OTHER; note = 2'-O-methylcytidine-3'-phosphate
  modified_base 7: mod_base = OTHER; note = 2'-deoxy-2'-fluorouridine-3'-phosphate
  modified_base 8: mod_base = OTHER; note = 2'-O-methylguanosine-3'-phosphate
  modified_base 9: mod_base = OTHER; note = 2'-deoxy-2'-fluoroadenosine-3'-phosphate
  modified_base 10: mod_base = OTHER; note = 2'-deoxy-2'-fluorocytidine-3'-phosphate
  modified_base 11: mod_base = OTHER; note = 2'-deoxy-2'-fluoroadenosine-3'-phosphate
  modified_base 12: mod_base = OTHER; note = 2'-O-methyladenosine-3'-phosphate
  modified_base 13: mod_base = OTHER; note = 2'-O-methyladenosine-3'-phosphate
  modified_base 14: mod_base = OTHER; note = 2'-O-methylguanosine-3'-phosphate
  modified_base 15: mod_base = OTHER; note = 2'-O-methyluridine-3'-phosphate
  modified_base 16: mod_base = OTHER; note = 2'-O-methyladenosine-3'-phosphate
  modified_base 17: mod_base = OTHER; note = 2'-O-methyladenosine-3'-phosphate
  modified_base 18: mod_base = OTHER; note = 2'-O-methyluridine-3'-phosphate
  modified_base 19: mod_base = OTHER; note = 2'-O-methylcytidine-3'-phosphate
  modified_base 20: mod_base = OTHER; note = 2'-O-methylcytidine-3'-phosphate
  modified_base 21: mod_base = OTHER; note = 2'-O-methyladenosine
catcactgacaaagtaatcca

SEQ ID NO: 4063 - RNA, 21 nt, synthetic construct
  source 1..21: mol_type = other RNA
  modified_base 1: mod_base = OTHER; note = 2'-O-methyladenosine-3'-phosphate
  modified_base 2: mod_base = OTHER; note = 2'-O-methyluridine-3'-phosphate
  modified_base 3: mod_base = OTHER; note = 2'-O-methylcytidine-3'-phosphate
  modified_base 4: mod_base = OTHER; note = 2'-O-methyladenosine-3'-phosphate
  modified_base 5: mod_base = OTHER; note = 2'-O-methylcytidine-3'-phosphate
  modified_base 6: mod_base = OTHER; note = 2'-O-methyluridine-3'-phosphate
  modified_base 7: mod_base = OTHER; note = 2'-deoxy-2'-fluoroguanosine-3'-phosphate
  modified_base 8: mod_base = OTHER; note = 2'-O-methyladenosine-3'-phosphate
  modified_base 9: mod_base = OTHER; note = 2'-deoxy-2'-fluorocytidine-3'-phosphate
  modified_base 10: mod_base = OTHER; note = 2'-deoxy-2'-fluoroadenosine-3'-phosphate
  modified_base 11: mod_base = OTHER; note = 2'-deoxy-2'-fluoroadenosine-3'-phosphate
  modified_base 12: mod_base = OTHER; note = 2'-O-methyladenosine-3'-phosphate
  modified_base 13: mod_base = OTHER; note = 2'-O-methylguanosine-3'-phosphate
  modified_base 14: mod_base = OTHER; note = 2'-O-methyluridine-3'-phosphate
  modified_base 15: mod_base = OTHER; note = 2'-O-methyladenosine-3'-phosphate
  modified_base 16: mod_base = OTHER; note = 2'-O-methyladenosine-3'-phosphate
  modified_base 17: mod_base = OTHER; note = 2'-O-methyluridine-3'-phosphate
  modified_base 18: mod_base = OTHER; note = 2'-O-methylcytidine-3'-phosphate
  modified_base 19: mod_base = OTHER; note = 2'-O-methylcytidine-3'-phosphate
  modified_base 20: mod_base = OTHER; note = 2'-O-methylcytidine-3'-phosphate
  modified_base 21: mod_base = OTHER; note = 2'-O-methyladenosine
atcactgacaaagtaatccca

SEQ ID NO: 4064 - RNA, 21 nt, synthetic construct
  source 1..21: mol_type = other RNA
  modified_base 1: mod_base = OTHER; note = 2'-O-methyluridine-3'-phosphate
  modified_base 2: mod_base = OTHER; note = 2'-O-methylcytidine-3'-phosphate
  modified_base 3: mod_base = OTHER; note = 2'-O-methyladenosine-3'-phosphate
  modified_base 4: mod_base = OTHER; note = 2'-O-methylcytidine-3'-phosphate
  modified_base 5: mod_base = OTHER; note = 2'-O-methyluridine-3'-phosphate
  modified_base 6: mod_base = OTHER; note = 2'-O-methylguanosine-3'-phosphate
  modified_base 7: mod_base = OTHER; note = 2'-deoxy-2'-fluoroadenosine-3'-phosphate
  modified_base 8: mod_base = OTHER; note = 2'-O-methylcytidine-3'-phosphate
  modified_base 9: mod_base = OTHER; note = 2'-deoxy-2'-fluoroadenosine-3'-phosphate
  modified_base 10: mod_base = OTHER; note = 2'-deoxy-2'-fluoroadenosine-3'-phosphate
  modified_base 11: mod_base = OTHER; note = 2'-deoxy-2'-fluoroadenosine-3'-phosphate
  modified_base 12: mod_base = OTHER; note = 2'-O-methylguanosine-3'-phosphate
  modified_base 13: mod_base = OTHER; note = 2'-O-methyluridine-3'-phosphate
  modified_base 14: mod_base = OTHER; note = 2'-O-methyladenosine-3'-phosphate
  modified_base 15: mod_base = OTHER; note = 2'-O-methyladenosine-3'-phosphate
  modified_base 16: mod_base = OTHER; note = 2'-O-methyluridine-3'-phosphate
  modified_base 17: mod_base = OTHER; note = 2'-O-methylcytidine-3'-phosphate
  modified_base 18: mod_base = OTHER; note = 2'-O-methylcytidine-3'-phosphate
  modified_base 19: mod_base = OTHER; note = 2'-O-methylcytidine-3'-phosphate
  modified_base 20: mod_base = OTHER; note = 2'-O-methyladenosine-3'-phosphate
  modified_base 21: mod_base = OTHER; note = 2'-O-methyladenosine
tcactgacaaagtaatcccaa

SEQ ID NO: 4065 - RNA, 21 nt, synthetic construct
  source 1..21: mol_type = other RNA
  modified_base 1: mod_base = OTHER; note = 2'-O-methylcytidine-3'-phosphate
  modified_base 2: mod_base = OTHER; note = 2'-O-methyladenosine-3'-phosphate
  modified_base 3: mod_base = OTHER; note = 2'-O-methylcytidine-3'-phosphate
  modified_base 4: mod_base = OTHER; note = 2'-O-methyluridine-3'-phosphate
  modified_base 5: mod_base = OTHER; note = 2'-O-methylguanosine-3'-phosphate
  modified_base 6: mod_base = OTHER; note = 2'-O-methyladenosine-3'-phosphate
  modified_base 7: mod_base = OTHER; note = 2'-deoxy-2'-fluorocytidine-3'-phosphate
  modified_base 8: mod_base = OTHER; note = 2'-O-methyladenosine-3'-phosphate
  modified_base 9: mod_base = OTHER; note = 2'-deoxy-2'-fluoroadenosine-3'-phosphate
  modified_base 10: mod_base = OTHER; note = 2'-deoxy-2'-fluoroadenosine-3'-phosphate
  modified_base 11: mod_base = OTHER; note = 2'-deoxy-2'-fluoroguanosine-3'-phosphate
  modified_base 12: mod_base = OTHER; note = 2'-O-methyluridine-3'-phosphate
  modified_base 13: mod_base = OTHER; note = 2'-O-methyladenosine-3'-phosphate
  modified_base 14: mod_base = OTHER; note = 2'-O-methyladenosine-3'-phosphate
  modified_base 15: mod_base = OTHER; note = 2'-O-methyluridine-3'-phosphate
  modified_base 16: mod_base = OTHER; note = 2'-O-methylcytidine-3'-phosphate
  modified_base 17: mod_base = OTHER; note = 2'-O-methylcytidine-3'-phosphate
  modified_base 18: mod_base = OTHER; note = 2'-O-methylcytidine-3'-phosphate
  modified_base 19: mod_base = OTHER; note = 2'-O-methyladenosine-3'-phosphate
  modified_base 20: mod_base = OTHER; note = 2'-O-methylguanosine-3'-phosphate
  modified_base 21: mod_base = OTHER; note = 2'-O-methyladenosine
cactgacaaagtaatcccaga

SEQ ID NO: 4066 - RNA, 21 nt, synthetic construct
  source 1..21: mol_type = other RNA
  modified_base 1: mod_base = OTHER; note = 2'-O-methyladenosine-3'-phosphate
  modified_base 2: mod_base = OTHER; note = 2'-O-methylcytidine-3'-phosphate
  modified_base 3: mod_base = OTHER; note = 2'-O-methyluridine-3'-phosphate
  modified_base 4: mod_base = OTHER; note = 2'-O-methylguanosine-3'-phosphate
  modified_base 5: mod_base = OTHER; note = 2'-O-methyladenosine-3'-phosphate
  modified_base 6: mod_base = OTHER; note = 2'-O-methylcytidine-3'-phosphate
  modified_base 7: mod_base = OTHER; note = 2'-deoxy-2'-fluoroadenosine-3'-phosphate
  modified_base 8: mod_base = OTHER; note = 2'-O-methyladenosine-3'-phosphate
  modified_base 9: mod_base = OTHER; note = 2'-deoxy-2'-fluoroadenosine-3'-phosphate
  modified_base 10: mod_base = OTHER; note = 2'-deoxy-2'-fluoroguanosine-3'-phosphate
  modified_base 11: mod_base = OTHER; note = 2'-deoxy-2'-fluorouridine-3'-phosphate
  modified_base 12: mod_base = OTHER; note = 2'-O-methyladenosine-3'-phosphate
  modified_base 13: mod_base = OTHER; note = 2'-O-methyladenosine-3'-phosphate
  modified_base 14: mod_base = OTHER; note = 2'-O-methyluridine-3'-phosphate
  modified_base 15: mod_base = OTHER; note = 2'-O-methylcytidine-3'-phosphate
  modified_base 16: mod_base = OTHER; note = 2'-O-methylcytidine-3'-phosphate
  modified_base 17: mod_base = OTHER; note = 2'-O-methylcytidine-3'-phosphate
  modified_base 18: mod_base = OTHER; note = 2'-O-methyladenosine-3'-phosphate
  modified_base 19: mod_base = OTHER; note = 2'-O-methylguanosine-3'-phosphate
  modified_base 20: mod_base = OTHER; note = 2'-O-methylcytidine-3'-phosphate
  modified_base 21: mod_base = OTHER; note = 2'-O-methyladenosine
actgacaaagtaatcccagca

SEQ ID NO: 4067 - RNA, 21 nt, synthetic construct
  source 1..21: mol_type = other RNA
  modified_base 1: mod_base = OTHER; note = 2'-O-methylcytidine-3'-phosphate
  modified_base 2: mod_base = OTHER; note = 2'-O-methyluridine-3'-phosphate
  modified_base 3: mod_base = OTHER; note = 2'-O-methylguanosine-3'-phosphate
  modified_base 4: mod_base = OTHER; note = 2'-O-methyladenosine-3'-phosphate
  modified_base 5: mod_base = OTHER; note = 2'-O-methylcytidine-3'-phosphate
  modified_base 6: mod_base = OTHER; note = 2'-O-methyladenosine-3'-phosphate
  modified_base 7: mod_base = OTHER; note = 2'-deoxy-2'-fluoroadenosine-3'-phosphate
  modified_base 8: mod_base = OTHER; note = 2'-O-methyladenosine-3'-phosphate
  modified_base 9: mod_base = OTHER; note = 2'-deoxy-2'-fluoroguanosine-3'-phosphate
  modified_base 10: mod_base = OTHER; note = 2'-deoxy-2'-fluorouridine-3'-phosphate
  modified_base 11: mod_base = OTHER; note = 2'-deoxy-2'-fluoroadenosine-3'-phosphate
  modified_base 12: mod_base = OTHER; note = 2'-O-methyladenosine-3'-phosphate
  modified_base 13: mod_base = OTHER; note = 2'-O-methyluridine-3'-phosphate
  modified_base 14: mod_base = OTHER; note = 2'-O-methylcytidine-3'-phosphate
  modified_base 15: mod_base = OTHER; note = 2'-O-methylcytidine-3'-phosphate
  modified_base 16: mod_base = OTHER; note = 2'-O-methylcytidine-3'-phosphate
  modified_base 17: mod_base = OTHER; note = 2'-O-methyladenosine-3'-phosphate
  modified_base 18: mod_base = OTHER; note = 2'-O-methylguanosine-3'-phosphate
  modified_base 19: mod_base = OTHER; note = 2'-O-methylcytidine-3'-phosphate
  modified_base 20: mod_base = OTHER; note = 2'-O-methyluridine-3'-phosphate
  modified_base 21: mod_base = OTHER; note = 2'-O-methyladenosine
ctgacaaagtaatcccagcta

SEQ ID NO: 4068 - RNA, 21 nt, synthetic construct
  source 1..21: mol_type = other RNA
  modified_base 1: mod_base = OTHER; note = 2'-O-methyluridine-3'-phosphate
  modified_base 2: mod_base = OTHER; note = 2'-O-methylguanosine-3'-phosphate
  modified_base 3: mod_base = OTHER; note = 2'-O-methyladenosine-3'-phosphate
  modified_base 4: mod_base = OTHER; note = 2'-O-methylcytidine-3'-phosphate
  modified_base 5: mod_base = OTHER; note = 2'-O-methyladenosine-3'-phosphate
  modified_base 6: mod_base = OTHER; note = 2'-O-methyladenosine-3'-phosphate
  modified_base 7: mod_base = OTHER; note = 2'-deoxy-2'-fluoroadenosine-3'-phosphate
  modified_base 8: mod_base = OTHER; note = 2'-O-methylguanosine-3'-phosphate
  modified_base 9: mod_base = OTHER; note = 2'-deoxy-2'-fluorouridine-3'-phosphate
  modified_base 10: mod_base = OTHER; note = 2'-deoxy-2'-fluoroadenosine-3'-phosphate
  modified_base 11: mod_base = OTHER; note = 2'-deoxy-2'-fluoroadenosine-3'-phosphate
  modified_base 12: mod_base = OTHER; note = 2'-O-methyluridine-3'-phosphate
  modified_base 13: mod_base = OTHER; note = 2'-O-methylcytidine-3'-phosphate
  modified_base 14: mod_base = OTHER; note = 2'-O-methylcytidine-3'-phosphate
  modified_base 15: mod_base = OTHER; note = 2'-O-methylcytidine-3'-phosphate
  modified_base 16: mod_base = OTHER; note = 2'-O-methyladenosine-3'-phosphate
  modified_base 17: mod_base = OTHER; note = 2'-O-methylguanosine-3'-phosphate
  modified_base 18: mod_base = OTHER; note = 2'-O-methylcytidine-3'-phosphate
  modified_base 19: mod_base = OTHER; note = 2'-O-methyluridine-3'-phosphate
  modified_base 20: mod_base = OTHER; note = 2'-O-methyluridine-3'-phosphate
  modified_base 21: mod_base = OTHER; note = 2'-O-methyladenosine
tgacaaagtaatcccagctta

SEQ ID NO: 4069 - RNA, 21 nt, synthetic construct
  source 1..21: mol_type = other RNA
  modified_base 1: mod_base = OTHER; note = 2'-O-methylguanosine-3'-phosphate
  modified_base 2: mod_base = OTHER; note = 2'-O-methyladenosine-3'-phosphate
  modified_base 3: mod_base = OTHER; note = 2'-O-methylcytidine-3'-phosphate
  modified_base 4: mod_base = OTHER; note = 2'-O-methyladenosine-3'-phosphate
  modified_base 5: mod_base = OTHER; note = 2'-O-methyladenosine-3'-phosphate
  modified_base 6: mod_base = OTHER; note = 2'-O-methyladenosine-3'-phosphate
  modified_base 7: mod_base = OTHER; note = 2'-deoxy-2'-fluoroguanosine-3'-phosphate
  modified_base 8: mod_base = OTHER; note = 2'-O-methyluridine-3'-phosphate
  modified_base 9: mod_base = OTHER; note = 2'-deoxy-2'-fluoroadenosine-3'-phosphate
  modified_base 10: mod_base = OTHER; note = 2'-deoxy-2'-fluoroadenosine-3'-phosphate
  modified_base 11: mod_base = OTHER; note = 2'-deoxy-2'-fluorouridine-3'-phosphate
  modified_base 12: mod_base = OTHER; note = 2'-O-methylcytidine-3'-phosphate
  modified_base 13: mod_base = OTHER; note = 2'-O-methylcytidine-3'-phosphate
  modified_base 14: mod_base = OTHER; note = 2'-O-methylcytidine-3'-phosphate
  modified_base 15: mod_base = OTHER; note = 2'-O-methyladenosine-3'-phosphate
  modified_base 16: mod_base = OTHER; note = 2'-O-methylguanosine-3'-phosphate
  modified_base 17: mod_base = OTHER; note = 2'-O-methylcytidine-3'-phosphate
  modified_base 18: mod_base = OTHER; note = 2'-O-methyluridine-3'-phosphate
  modified_base 19: mod_base = OTHER; note = 2'-O-methyluridine-3'-phosphate
  modified_base 20: mod_base = OTHER; note = 2'-O-methylguanosine-3'-phosphate
  modified_base 21: mod_base = OTHER; note = 2'-O-methyladenosine
gacaaagtaatcccagcttga

SEQ ID NO: 4070 - RNA, 21 nt, synthetic construct
  source 1..21: mol_type = other RNA
  modified_base 1: mod_base = OTHER; note = 2'-O-methyladenosine-3'-phosphate
  modified_base 2: mod_base = OTHER; note = 2'-O-methylcytidine-3'-phosphate
  modified_base 3: mod_base = OTHER; note = 2'-O-methyladenosine-3'-phosphate
  modified_base 4: mod_base = OTHER; note = 2'-O-methyladenosine-3'-phosphate
  modified_base 5: mod_base = OTHER; note = 2'-O-methyladenosine-3'-phosphate
  modified_base 6: mod_base = OTHER; note = 2'-O-methylguanosine-3'-phosphate
  modified_base 7: mod_base = OTHER; note = 2'-deoxy-2'-fluorouridine-3'-phosphate
  modified_base 8: mod_base = OTHER; note = 2'-O-methyladenosine-3'-phosphate
  modified_base 9: mod_base = OTHER; note = 2'-deoxy-2'-fluoroadenosine-3'-phosphate
  modified_base 10: mod_base = OTHER; note = 2'-deoxy-2'-fluorouridine-3'-phosphate
  modified_base 11: mod_base = OTHER; note = 2'-deoxy-2'-fluorocytidine-3'-phosphate
  modified_base 12: mod_base = OTHER; note = 2'-O-methylcytidine-3'-phosphate
  modified_base 13: mod_base = OTHER; note = 2'-O-methylcytidine-3'-phosphate
  modified_base 14: mod_base = OTHER; note = 2'-O-methyladenosine-3'-phosphate
  modified_base 15: mod_base = OTHER; note = 2'-O-methylguanosine-3'-phosphate
  modified_base 16: mod_base = OTHER; note = 2'-O-methylcytidine-3'-phosphate
  modified_base 17: mod_base = OTHER; note = 2'-O-methyluridine-3'-phosphate
  modified_base 18: mod_base = OTHER; note = 2'-O-methyluridine-3'-phosphate
  modified_base 19: mod_base = OTHER; note = 2'-O-methylguanosine-3'-phosphate
  modified_base 20: mod_base = OTHER; note = 2'-O-methyluridine-3'-phosphate
  modified_base 21: mod_base = OTHER; note = 2'-O-methyladenosine
acaaagtaatcccagcttgta

SEQ ID NO: 4071 - RNA, 21 nt, synthetic construct
  source 1..21: mol_type = other RNA
  modified_base 1: mod_base = OTHER; note = 2'-O-methylcytidine-3'-phosphate
  modified_base 2: mod_base = OTHER; note = 2'-O-methyladenosine-3'-phosphate
  modified_base 3: mod_base = OTHER; note = 2'-O-methyladenosine-3'-phosphate
  modified_base 4: mod_base = OTHER; note = 2'-O-methyladenosine-3'-phosphate
  modified_base 5: mod_base = OTHER; note = 2'-O-methylguanosine-3'-phosphate
  modified_base 6: mod_base = OTHER; note = 2'-O-methyluridine-3'-phosphate
  modified_base 7: mod_base = OTHER; note = 2'-deoxy-2'-fluoroadenosine-3'-phosphate
  modified_base 8: mod_base = OTHER; note = 2'-O-methyladenosine-3'-phosphate
  modified_base 9: mod_base = OTHER; note = 2'-deoxy-2'-fluorouridine-3'-phosphate
  modified_base 10: mod_base = OTHER; note = 2'-deoxy-2'-fluorocytidine-3'-phosphate
  modified_base 11: mod_base = OTHER; note = 2'-deoxy-2'-fluorocytidine-3'-phosphate
  modified_base 12: mod_base = OTHER; note = 2'-O-methylcytidine-3'-phosphate
  modified_base 13: mod_base = OTHER; note = 2'-O-methyladenosine-3'-phosphate
  modified_base 14: mod_base = OTHER; note = 2'-O-methylguanosine-3'-phosphate
  modified_base 15: mod_base = OTHER; note = 2'-O-methylcytidine-3'-phosphate
  modified_base 16: mod_base = OTHER; note = 2'-O-methyluridine-3'-phosphate
  modified_base 17: mod_base = OTHER; note = 2'-O-methyluridine-3'-phosphate
  modified_base 18: mod_base = OTHER; note = 2'-O-methylguanosine-3'-phosphate
  modified_base 19: mod_base = OTHER; note = 2'-O-methyluridine-3'-phosphate
  modified_base 20: mod_base = OTHER; note = 2'-O-methylcytidine-3'-phosphate
  modified_base 21: mod_base = OTHER; note = 2'-O-methyladenosine
caaagtaatcccagcttgtca

SEQ ID NO: 4072 - RNA, 21 nt, synthetic construct
  source 1..21: mol_type = other RNA
  modified_base 1: mod_base = OTHER; note = 2'-O-methyladenosine-3'-phosphate
  modified_base 2: mod_base = OTHER; note = 2'-O-methyladenosine-3'-phosphate
  modified_base 3: mod_base = OTHER; note = 2'-O-methyladenosine-3'-phosphate
  modified_base 4: mod_base = OTHER; note = 2'-O-methylguanosine-3'-phosphate
  modified_base 5: mod_base = OTHER; note = 2'-O-methyluridine-3'-phosphate
  modified_base 6: mod_base = OTHER; note = 2'-O-methyladenosine-3'-phosphate
  modified_base 7: mod_base = OTHER; note = 2'-deoxy-2'-fluoroadenosine-3'-phosphate
  modified_base 8: mod_base = OTHER; note = 2'-O-methyluridine-3'-phosphate
  modified_base 9: mod_base = OTHER; note = 2'-deoxy-2'-fluorocytidine-3'-phosphate
  modified_base 10: mod_base = OTHER; note = 2'-deoxy-2'-fluorocytidine-3'-phosphate
  modified_base 11: mod_base = OTHER; note = 2'-deoxy-2'-fluorocytidine-3'-phosphate
  modified_base 12: mod_base = OTHER; note = 2'-O-methyladenosine-3'-phosphate
  modified_base 13: mod_base = OTHER; note = 2'-O-methylguanosine-3'-phosphate
  modified_base 14: mod_base = OTHER; note = 2'-O-methylcytidine-3'-phosphate
  modified_base 15: mod_base = OTHER; note = 2'-O-methyluridine-3'-phosphate
  modified_base 16: mod_base = OTHER; note = 2'-O-methyluridine-3'-phosphate
  modified_base 17: mod_base = OTHER; note = 2'-O-methylguanosine-3'-phosphate
  modified_base 18: mod_base = OTHER; note = 2'-O-methyluridine-3'-phosphate
  modified_base 19: mod_base = OTHER; note = 2'-O-methylcytidine-3'-phosphate
  modified_base 20: mod_base = OTHER; note = 2'-O-methyluridine-3'-phosphate
  modified_base 21: mod_base = OTHER; note = 2'-O-methyladenosine
aaagtaatcccagcttgtcta

SEQ ID NO: 4073 - RNA, 21 nt, synthetic construct
  source 1..21: mol_type = other RNA
  modified_base 1: mod_base = OTHER; note = 2'-O-methyluridine-3'-phosphate
  modified_base 2: mod_base = OTHER; note = 2'-O-methyladenosine-3'-phosphate
  modified_base 3: mod_base = OTHER; note = 2'-O-methyladenosine-3'-phosphate
  modified_base 4: mod_base = OTHER; note = 2'-O-methyluridine-3'-phosphate
  modified_base 5: mod_base = OTHER; note = 2'-O-methylcytidine-3'-phosphate
  modified_base 6: mod_base = OTHER; note = 2'-O-methylcytidine-3'-phosphate
  modified_base 7: mod_base = OTHER; note = 2'-deoxy-2'-fluorocytidine-3'-phosphate
  modified_base 8: mod_base = OTHER; note = 2'-O-methyladenosine-3'-phosphate
  modified_base 9: mod_base = OTHER; note = 2'-deoxy-2'-fluoroguanosine-3'-phosphate
  modified_base 10: mod_base = OTHER; note = 2'-deoxy-2'-fluorocytidine-3'-phosphate
  modified_base 11: mod_base = OTHER; note = 2'-deoxy-2'-fluorouridine-3'-phosphate
  modified_base 12: mod_base = OTHER; note = 2'-O-methyluridine-3'-phosphate
  modified_base 13: mod_base = OTHER; note = 2'-O-methylguanosine-3'-phosphate
  modified_base 14: mod_base = OTHER; note = 2'-O-methyluridine-3'-phosphate
  modified_base 15: mod_base = OTHER; note = 2'-O-methylcytidine-3'-phosphate
  modified_base 16: mod_base = OTHER; note = 2'-O-methyluridine-3'-phosphate
  modified_base 17: mod_base = OTHER; note = 2'-O-methylguanosine-3'-phosphate
  modified_base 18: mod_base = OTHER; note = 2'-O-methylcytidine-3'-phosphate
  modified_base 19: mod_base = OTHER; note = 2'-O-methylcytidine-3'-phosphate
  modified_base 20: mod_base = OTHER; note = 2'-O-methyladenosine-3'-phosphate
  modified_base 21: mod_base = OTHER; note = 2'-O-methyladenosine
taatcccagcttgtctgccaa

SEQ ID NO: 4074 - RNA, 21 nt, synthetic construct
  source 1..21: mol_type = other RNA
  modified_base 1: mod_base = OTHER; note = 2'-O-methyladenosine-3'-phosphate
  modified_base 2: mod_base = OTHER; note = 2'-O-methyluridine-3'-phosphate
  modified_base 3: mod_base = OTHER; note = 2'-O-methylcytidine-3'-phosphate
  modified_base 4: mod_base = OTHER; note = 2'-O-methylcytidine-3'-phosphate
  modified_base 5: mod_base = OTHER; note = 2'-O-methylcytidine-3'-phosphate
  modified_base 6: mod_base = OTHER; note = 2'-O-methyladenosine-3'-phosphate
  modified_base 7: mod_base = OTHER; note = 2'-deoxy-2'-fluoroguanosine-3'-phosphate
  modified_base 8: mod_base = OTHER; note = 2'-O-methylcytidine-3'-phosphate
  modified_base 9: mod_base = OTHER; note = 2'-deoxy-2'-fluorouridine-3'-phosphate
  modified_base 10: mod_base = OTHER; note = 2'-deoxy-2'-fluorouridine-3'-phosphate
  modified_base 11: mod_base = OTHER; note = 2'-deoxy-2'-fluoroguanosine-3'-phosphate
  modified_base 12: mod_base = OTHER; note = 2'-O-methyluridine-3'-phosphate
  modified_base 13: mod_base = OTHER; note = 2'-O-methylcytidine-3'-phosphate
  modified_base 14: mod_base = OTHER; note = 2'-O-methyluridine-3'-phosphate
  modified_base 15: mod_base = OTHER; note = 2'-O-methylguanosine-3'-phosphate
  modified_base 16: mod_base = OTHER; note = 2'-O-methylcytidine-3'-phosphate
  modified_base 17: mod_base = OTHER; note = 2'-O-methylcytidine-3'-phosphate
  modified_base 18: mod_base = OTHER; note = 2'-O-methyladenosine-3'-phosphate
  modified_base 19: mod_base = OTHER; note = 2'-O-methyluridine-3'-phosphate
  modified_base 20: mod_base = OTHER; note = 2'-O-methylcytidine-3'-phosphate
  modified_base 21: mod_base = OTHER; note = 2'-O-methyladenosine
atcccagcttgtctgccatca

SEQ ID NO: 4075 - RNA, 21 nt, synthetic construct
  source 1..21: mol_type = other RNA
  modified_base 1: mod_base = OTHER; note = 2'-O-methylcytidine-3'-phosphate
  modified_base 2: mod_base = OTHER; note = 2'-O-methyluridine-3'-phosphate
  modified_base 3: mod_base = OTHER; note = 2'-O-methylguanosine-3'-phosphate
  modified_base 4: mod_base = OTHER; note = 2'-O-methyladenosine-3'-phosphate
  modified_base 5: mod_base = OTHER; note = 2'-O-methylcytidine-3'-phosphate
  modified_base 6: mod_base = OTHER; note = 2'-O-methylcytidine-3'-phosphate
  modified_base 7: mod_base = OTHER; note = 2'-deoxy-2'-fluoroguanosine-3'-phosphate
  modified_base 8: mod_base = OTHER; note = 2'-O-methylguanosine-3'-phosphate
  modified_base 9: mod_base = OTHER; note = 2'-deoxy-2'-fluoroadenosine-3'-phosphate
  modified_base 10: mod_base = OTHER; note = 2'-deoxy-2'-fluorocytidine-3'-phosphate
  modified_base 11: mod_base = OTHER; note = 2'-deoxy-2'-fluorocytidine-3'-phosphate
  modified_base 12: mod_base = OTHER; note = 2'-O-methylguanosine-3'-phosphate
  modified_base 13: mod_base = OTHER; note = 2'-O-methyladenosine-3'-phosphate
  modified_base 14: mod_base = OTHER; note = 2'-O-methyladenosine-3'-phosphate
  modified_base 15: mod_base = OTHER; note = 2'-O-methyluridine-3'-phosphate
  modified_base 16: mod_base = OTHER; note = 2'-O-methylguanosine-3'-phosphate
  modified_base 17: mod_base = OTHER; note = 2'-O-methyluridine-3'-phosphate
  modified_base 18: mod_base = OTHER; note = 2'-O-methyluridine-3'-phosphate
  modified_base 19: mod_base = OTHER; note = 2'-O-methyluridine-3'-phosphate
  modified_base 20: mod_base = OTHER; note = 2'-O-methylcytidine-3'-phosphate
  modified_base 21: mod_base = OTHER; note = 2'-O-methyladenosine
ctgaccggaccgaatgtttca

SEQ ID NO: 4076 - RNA, 21 nt, synthetic construct
  source 1..21: mol_type = other RNA
  modified_base 1: mod_base = OTHER; note = 2'-O-methylguanosine-3'-phosphate
  modified_base 2: mod_base = OTHER; note = 2'-O-methyladenosine-3'-phosphate
  modified_base 3: mod_base = OTHER; note = 2'-O-methylcytidine-3'-phosphate
  modified_base 4: mod_base = OTHER; note = 2'-O-methylcytidine-3'-phosphate
  modified_base 5: mod_base = OTHER; note = 2'-O-methylguanosine-3'-phosphate
  modified_base 6: mod_base = OTHER; note = 2'-O-methylguanosine-3'-phosphate
  modified_base 7: mod_base = OTHER; note = 2'-deoxy-2'-fluoroadenosine-3'-phosphate
  modified_base 8: mod_base = OTHER; note = 2'-O-methylcytidine-3'-phosphate
  modified_base 9: mod_base = OTHER; note = 2'-deoxy-2'-fluorocytidine-3'-phosphate
  modified_base 10: mod_base = OTHER; note = 2'-deoxy-2'-fluoroguanosine-3'-phosphate
  modified_base 11: mod_base = OTHER; note = 2'-deoxy-2'-fluoroadenosine-3'-phosphate
  modified_base 12: mod_base = OTHER; note = 2'-O-methyladenosine-3'-phosphate
  modified_base 13: mod_base = OTHER; note = 2'-O-methyluridine-3'-phosphate
  modified_base 14: mod_base = OTHER; note = 2'-O-methylguanosine-3'-phosphate
  modified_base 15: mod_base = OTHER; note = 2'-O-methyluridine-3'-phosphate
  modified_base 16: mod_base = OTHER; note = 2'-O-methyluridine-3'-phosphate
  modified_base 17: mod_base = OTHER; note = 2'-O-methyluridine-3'-phosphate
  modified_base 18: mod_base = OTHER; note = 2'-O-methylcytidine-3'-phosphate
  modified_base 19: mod_base = OTHER; note = 2'-O-methyladenosine-3'-phosphate
  modified_base 20: mod_base = OTHER; note = 2'-O-methyluridine-3'-phosphate
  modified_base 21: mod_base = OTHER; note = 2'-O-methyladenosine
gaccggaccgaatgtttcata

SEQ ID NO: 4077 - RNA, 21 nt, synthetic construct
  source 1..21: mol_type = other RNA
  modified_base 1: mod_base = OTHER; note = 2'-O-methyladenosine-3'-phosphate
  modified_base 2: mod_base = OTHER; note = 2'-O-methylcytidine-3'-phosphate
  modified_base 3: mod_base = OTHER; note = 2'-O-methylcytidine-3'-phosphate
  modified_base 4: mod_base = OTHER; note = 2'-O-methylguanosine-3'-phosphate
  modified_base 5: mod_base = OTHER; note = 2'-O-methylguanosine-3'-phosphate
  modified_base 6: mod_base = OTHER; note = 2'-O-methyladenosine-3'-phosphate
  modified_base 7: mod_base = OTHER; note = 2'-deoxy-2'-fluorocytidine-3'-phosphate
  modified_base 8: mod_base = OTHER; note = 2'-O-methylcytidine-3'-phosphate
  modified_base 9: mod_base = OTHER; note = 2'-deoxy-2'-fluoroguanosine-3'-phosphate
  modified_base 10: mod_base = OTHER; note = 2'-deoxy-2'-fluoroadenosine-3'-phosphate
  modified_base 11: mod_base = OTHER; note = 2'-deoxy-2'-fluoroadenosine-3'-phosphate
  modified_base 12: mod_base = OTHER; note = 2'-O-methyluridine-3'-phosphate
  modified_base 13: mod_base = OTHER; note = 2'-O-methylguanosine-3'-phosphate
  modified_base 14: mod_base = OTHER; note = 2'-O-methyluridine-3'-phosphate
  modified_base 15: mod_base = OTHER; note = 2'-O-methyluridine-3'-phosphate
  modified_base 16: mod_base = OTHER; note = 2'-O-methyluridine-3'-phosphate
  modified_base 17: mod_base = OTHER; note = 2'-O-methylcytidine-3'-phosphate
  modified_base 18: mod_base = OTHER; note = 2'-O-methyladenosine-3'-phosphate
  modified_base 19: mod_base = OTHER; note = 2'-O-methyluridine-3'-phosphate
  modified_base 20: mod_base = OTHER; note = 2'-O-methylcytidine-3'-phosphate
  modified_base 21: mod_base = OTHER; note = 2'-O-methyladenosine
accggaccgaatgtttcatca

SEQ ID NO: 4078 - RNA, 21 nt, synthetic construct
  source 1..21: mol_type = other RNA
  modified_base 1: mod_base = OTHER; note = 2'-O-methylcytidine-3'-phosphate
  modified_base 2: mod_base = OTHER; note = 2'-O-methylcytidine-3'-phosphate
  modified_base 3: mod_base = OTHER; note = 2'-O-methylguanosine-3'-phosphate
  modified_base 4: mod_base = OTHER; note = 2'-O-methylguanosine-3'-phosphate
  modified_base 5: mod_base = OTHER; note = 2'-O-methyladenosine-3'-phosphate
  modified_base 6: mod_base = OTHER; note = 2'-O-methylcytidine-3'-phosphate
  modified_base 7: mod_base = OTHER; note = 2'-deoxy-2'-fluorocytidine-3'-phosphate
  modified_base 8: mod_base = OTHER; note = 2'-O-methylguanosine-3'-phosphate
  modified_base 9: mod_base = OTHER; note = 2'-deoxy-2'-fluoroadenosine-3'-phosphate
  modified_base 10: mod_base = OTHER; note = 2'-deoxy-2'-fluoroadenosine-3'-phosphate
  modified_base 11: mod_base = OTHER; note = 2'-deoxy-2'-fluorouridine-3'-phosphate
  modified_base 12: mod_base = OTHER; note = 2'-O-methylguanosine-3'-phosphate
  modified_base 13: mod_base = OTHER; note = 2'-O-methyluridine-3'-phosphate
  modified_base 14: mod_base = OTHER; note = 2'-O-methyluridine-3'-phosphate
  modified_base 15: mod_base = OTHER; note = 2'-O-methyluridine-3'-phosphate
  modified_base 16: mod_base = OTHER; note = 2'-O-methylcytidine-3'-phosphate
  modified_base 17: mod_base = OTHER; note = 2'-O-methyladenosine-3'-phosphate
  modified_base 18: mod_base = OTHER; note = 2'-O-methyluridine-3'-phosphate
  modified_base 19: mod_base = OTHER; note = 2'-O-methylcytidine-3'-phosphate
  modified_base 20: mod_base = OTHER; note = 2'-O-methyladenosine-3'-phosphate
  modified_base 21: mod_base = OTHER; note = 2'-O-methyladenosine
ccggaccgaatgtttcatcaa

SEQ ID NO: 4079 - RNA, 21 nt, synthetic construct
  source 1..21: mol_type = other RNA
  modified_base 1: mod_base = OTHER; note = 2'-O-methylcytidine-3'-phosphate
  modified_base 2: mod_base = OTHER; note = 2'-O-methylguanosine-3'-phosphate
  modified_base 3: mod_base = OTHER; note = 2'-O-methylguanosine-3'-phosphate
  modified_base 4: mod_base = OTHER; note = 2'-O-methyladenosine-3'-phosphate
  modified_base 5: mod_base = OTHER; note = 2'-O-methylcytidine-3'-phosphate
  modified_base 6: mod_base = OTHER; note = 2'-O-methylcytidine-3'-phosphate
  modified_base 7: mod_base = OTHER; note = 2'-deoxy-2'-fluoroguanosine-3'-phosphate
  modified_base 8: mod_base = OTHER; note = 2'-O-methyladenosine-3'-phosphate
  modified_base 9: mod_base = OTHER; note = 2'-deoxy-2'-fluoroadenosine-3'-phosphate
  modified_base 10: mod_base = OTHER; note = 2'-deoxy-2'-fluorouridine-3'-phosphate
  modified_base 11: mod_base = OTHER; note = 2'-deoxy-2'-fluoroguanosine-3'-phosphate
  modified_base 12: mod_base = OTHER; note = 2'-O-methyluridine-3'-phosphate
  modified_base 13: mod_base = OTHER; note = 2'-O-methyluridine-3'-phosphate
  modified_base 14: mod_base = OTHER; note = 2'-O-methyluridine-3'-phosphate
  modified_base 15: mod_base = OTHER; note = 2'-O-methylcytidine-3'-phosphate
  modified_base 16: mod_base = OTHER; note = 2'-O-methyladenosine-3'-phosphate
  modified_base 17: mod_base = OTHER; note = 2'-O-methyluridine-3'-phosphate
  modified_base 18: mod_base = OTHER; note = 2'-O-methylcytidine-3'-phosphate
  modified_base 19: mod_base = OTHER; note = 2'-O-methyladenosine-3'-phosphate
  modified_base 20: mod_base = OTHER; note = 2'-O-methylcytidine-3'-phosphate
  modified_base 21: mod_base = OTHER; note = 2'-O-methyladenosine
cggaccgaatgtttcatcaca

SEQ ID NO: 4080 - RNA, 21 nt, synthetic construct
  source 1..21: mol_type = other RNA
  modified_base 1: mod_base = OTHER; note = 2'-O-methylguanosine-3'-phosphate
  modified_base 2: mod_base = OTHER; note = 2'-O-methylguanosine-3'-phosphate
  modified_base 3: mod_base = OTHER; note = 2'-O-methyladenosine-3'-phosphate
  modified_base 4: mod_base = OTHER; note = 2'-O-methylcytidine-3'-phosphate
  modified_base 5: mod_base = OTHER; note = 2'-O-methylcytidine-3'-phosphate
  modified_base 6: mod_base = OTHER; note = 2'-O-methylguanosine-3'-phosphate
  modified_base 7: mod_base = OTHER; note = 2'-deoxy-2'-fluoroadenosine-3'-phosphate
  modified_base 8: mod_base = OTHER; note = 2'-O-methyladenosine-3'-phosphate
  modified_base 9: mod_base = OTHER; note = 2'-deoxy-2'-fluorouridine-3'-phosphate
  modified_base 10: mod_base = OTHER; note = 2'-deoxy-2'-fluoroguanosine-3'-phosphate
  modified_base 11: mod_base = OTHER; note = 2'-deoxy-2'-fluorouridine-3'-phosphate
  modified_base 12: mod_base = OTHER; note = 2'-O-methyluridine-3'-phosphate
  modified_base 13: mod_base = OTHER; note = 2'-O-methyluridine-3'-phosphate
  modified_base 14: mod_base = OTHER; note = 2'-O-methylcytidine-3'-phosphate
  modified_base 15: mod_base = OTHER; note = 2'-O-methyladenosine-3'-phosphate
  modified_base 16: mod_base = OTHER; note = 2'-O-methyluridine-3'-phosphate
  modified_base 17: mod_base = OTHER; note = 2'-O-methylcytidine-3'-phosphate
  modified_base 18: mod_base = OTHER; note = 2'-O-methyladenosine-3'-phosphate
  modified_base 19: mod_base = OTHER; note = 2'-O-methylcytidine-3'-phosphate
  modified_base 20: mod_base = OTHER; note = 2'-O-methyluridine-3'-phosphate
  modified_base 21: mod_base = OTHER; note = 2'-O-methyladenosine
ggaccgaatgtttcatcacta

SEQ ID NO: 4081 - RNA, 21 nt, synthetic construct
  source 1..21: mol_type = other RNA
  modified_base 1: mod_base = OTHER; note = 2'-O-methylguanosine-3'-phosphate
  modified_base 2: mod_base = OTHER; note = 2'-O-methyladenosine-3'-phosphate
  modified_base 3: mod_base = OTHER; note = 2'-O-methylcytidine-3'-phosphate
  modified_base 4: mod_base = OTHER; note = 2'-O-methylcytidine-3'-phosphate
  modified_base 5: mod_base = OTHER; note = 2'-O-methylguanosine-3'-phosphate
  modified_base 6: mod_base = OTHER; note = 2'-O-methyladenosine-3'-phosphate
  modified_base 7: mod_base = OTHER; note = 2'-deoxy-2'-fluoroadenosine-3'-phosphate
  modified_base 8: mod_base = OTHER; note = 2'-O-methyluridine-3'-phosphate
  modified_base 9: mod_base = OTHER; note = 2'-deoxy-2'-fluoroguanosine-3'-phosphate
  modified_base 10: mod_base = OTHER; note = 2'-deoxy-2'-fluorouridine-3'-phosphate
  modified_base 11: mod_base = OTHER; note = 2'-deoxy-2'-fluorouridine-3'-phosphate
  modified_base 12: mod_base = OTHER; note = 2'-O-methyluridine-3'-phosphate
  modified_base 13: mod_base = OTHER; note = 2'-O-methylcytidine-3'-phosphate
  modified_base 14: mod_base = OTHER; note = 2'-O-methyladenosine-3'-phosphate
  modified_base 15: mod_base = OTHER; note = 2'-O-methyluridine-3'-phosphate
  modified_base 16: mod_base = OTHER; note = 2'-O-methylcytidine-3'-phosphate
  modified_base 17: mod_base = OTHER; note = 2'-O-methyladenosine-3'-phosphate
  modified_base 18: mod_base = OTHER; note = 2'-O-methylcytidine-3'-phosphate
  modified_base 19: mod_base = OTHER; note = 2'-O-methyluridine-3'-phosphate
  modified_base 20: mod_base = OTHER; note = 2'-O-methylguanosine-3'-phosphate
  modified_base 21: mod_base = OTHER; note = 2'-O-methyladenosine
gaccgaatgtttcatcactga

SEQ ID NO: 4082 - RNA, 21 nt, synthetic construct
  source 1..21: mol_type = other RNA
  modified_base 1: mod_base = OTHER; note = 2'-O-methylcytidine-3'-phosphate
  modified_base 2: mod_base = OTHER; note = 2'-O-methylguanosine-3'-phosphate
  modified_base 3: mod_base = OTHER; note = 2'-O-methyladenosine-3'-phosphate
  modified_base 4: mod_base = OTHER; note = 2'-O-methyladenosine-3'-phosphate
  modified_base 5: mod_base = OTHER; note = 2'-O-methyluridine-3'-phosphate
  modified_base 6: mod_base = OTHER; note = 2'-O-methylguanosine-3'-phosphate
  modified_base 7: mod_base = OTHER; note = 2'-deoxy-2'-fluorouridine-3'-phosphate
  modified_base 8: mod_base = OTHER; note = 2'-O-methyluridine-3'-phosphate
  modified_base 9: mod_base = OTHER; note = 2'-deoxy-2'-fluorouridine-3'-phosphate
  modified_base 10: mod_base = OTHER; note = 2'-deoxy-2'-fluorocytidine-3'-phosphate
  modified_base 11: mod_base = OTHER; note = 2'-deoxy-2'-fluoroadenosine-3'-phosphate
  modified_base 12: mod_base = OTHER; note = 2'-O-methyluridine-3'-phosphate
  modified_base 13: mod_base = OTHER; note = 2'-O-methylcytidine-3'-phosphate
  modified_base 14: mod_base = OTHER; note = 2'-O-methyladenosine-3'-phosphate
  modified_base 15: mod_base = OTHER; note = 2'-O-methylcytidine-3'-phosphate
  modified_base 16: mod_base = OTHER; note = 2'-O-methyluridine-3'-phosphate
  modified_base 17: mod_base = OTHER; note = 2'-O-methylguanosine-3'-phosphate
  modified_base 18: mod_base = OTHER; note = 2'-O-methylguanosine-3'-phosphate
  modified_base 19: mod_base = OTHER; note = 2'-O-methylcytidine-3'-phosphate
  modified_base 20: mod_base = OTHER; note = 2'-O-methyluridine-3'-phosphate
  modified_base 21: mod_base = OTHER; note = 2'-O-methyladenosine
cgaatgtttcatcactggcta

SEQ ID NO: 4083 - RNA, 21 nt, synthetic construct
  source 1..21: mol_type = other RNA
  modified_base 1: mod_base = OTHER; note = 2'-O-methylguanosine-3'-phosphate
  modified_base 2: mod_base = OTHER; note = 2'-O-methyladenosine-3'-phosphate
  modified_base 3: mod_base = OTHER; note = 2'-O-methylguanosine-3'-phosphate
  modified_base 4: mod_base = OTHER; note = 2'-O-methyladenosine-3'-phosphate
  modified_base 5: mod_base = OTHER; note = 2'-O-methyladenosine-3'-phosphate
  modified_base 6: mod_base = OTHER; note = 2'-O-methyladenosine-3'-phosphate
  modified_base 7: mod_base = OTHER; note = 2'-deoxy-2'-fluorocytidine-3'-phosphate
  modified_base 8: mod_base = OTHER; note = 2'-O-methylcytidine-3'-phosphate
  modified_base 9: mod_base = OTHER; note = 2'-deoxy-2'-fluorocytidine-3'-phosphate
  modified_base 10: mod_base = OTHER; note = 2'-deoxy-2'-fluoroadenosine-3'-phosphate
  modified_base 11: mod_base = OTHER; note = 2'-deoxy-2'-fluoroadenosine-3'-phosphate
  modified_base 12: mod_base = OTHER; note = 2'-O-methylguanosine-3'-phosphate
  modified_base 13: mod_base = OTHER; note = 2'-O-methylguanosine-3'-phosphate
  modified_base 14: mod_base = OTHER; note = 2'-O-methyluridine-3'-phosphate
  modified_base 15: mod_base = OTHER; note = 2'-O-methyladenosine-3'-phosphate
  modified_base 16: mod_base = OTHER; note = 2'-O-methylcytidine-3'-phosphate
  modified_base 17: mod_base = OTHER; note = 2'-O-methyluridine-3'-phosphate
  modified_base 18: mod_base = OTHER; note = 2'-O-methyluridine-3'-phosphate
  modified_base 19: mod_base = OTHER; note = 2'-O-methyluridine-3'-phosphate
  modified_base 20: mod_base = OTHER; note = 2'-O-methyluridine-3'-phosphate
  modified_base 21: mod_base = OTHER; note = 2'-O-methyladenosine
gagaaacccaaggtactttta

SEQ ID NO: 4084 - RNA, 21 nt, synthetic construct
  source 1..21: mol_type = other RNA
  modified_base 1: mod_base = OTHER; note = 2'-O-methyladenosine-3'-phosphate
  modified_base 2: mod_base = OTHER; note = 2'-O-methylguanosine-3'-phosphate
  modified_base 3: mod_base = OTHER; note = 2'-O-methyladenosine-3'-phosphate
  modified_base 4: mod_base = OTHER; note = 2'-O-methyladenosine-3'-phosphate
  modified_base 5: mod_base = OTHER; note = 2'-O-methyladenosine-3'-phosphate
  modified_base 6: mod_base = OTHER; note = 2'-O-methylcytidine-3'-phosphate
  modified_base 7: mod_base = OTHER; note = 2'-deoxy-2'-fluorocytidine-3'-phosphate
  modified_base 8: mod_base = OTHER; note = 2'-O-methylcytidine-3'-phosphate
  modified_base 9: mod_base = OTHER; note = 2'-deoxy-2'-fluoroadenosine-3'-phosphate
  modified_base 10: mod_base = OTHER; note = 2'-deoxy-2'-fluoroadenosine-3'-phosphate
  modified_base 11: mod_base = OTHER; note = 2'-deoxy-2'-fluoroguanosine-3'-phosphate
  modified_base 12: mod_base = OTHER; note = 2'-O-methylguanosine-3'-phosphate
  modified_base 13: mod_base = OTHER; note = 2'-O-methyluridine-3'-phosphate
  modified_base 14: mod_base = OTHER; note = 2'-O-methyladenosine-3'-phosphate
  modified_base 15: mod_base = OTHER; note = 2'-O-methylcytidine-3'-phosphate
  modified_base 16: mod_base = OTHER; note = 2'-O-methyluridine-3'-phosphate
  modified_base 17: mod_base = OTHER; note = 2'-O-methyluridine-3'-phosphate
  modified_base 18: mod_base = OTHER; note = 2'-O-methyluridine-3'-phosphate
  modified_base 19: mod_base = OTHER; note = 2'-O-methyluridine-3'-phosphate
  modified_base 20: mod_base = OTHER; note = 2'-O-methylguanosine-3'-phosphate
  modified_base 21: mod_base = OTHER; note = 2'-O-methyladenosine
agaaacccaaggtacttttga

SEQ ID NO: 4085 - RNA, 21 nt, synthetic construct
  source 1..21: mol_type = other RNA
  modified_base 1: mod_base = OTHER; note = 2'-O-methylguanosine-3'-phosphate
  modified_base 2: mod_base = OTHER; note = 2'-O-methyladenosine-3'-phosphate
  modified_base 3: mod_base = OTHER; note = 2'-O-methyladenosine-3'-phosphate
  modified_base 4: mod_base = OTHER; note = 2'-O-methyladenosine-3'-phosphate
  modified_base 5: mod_base = OTHER; note = 2'-O-methylcytidine-3'-phosphate
  modified_base 6: mod_base = OTHER; note = 2'-O-methylcytidine-3'-phosphate
  modified_base 7: mod_base = OTHER; note = 2'-deoxy-2'-fluorocytidine-3'-phosphate
  modified_base 8: mod_base = OTHER; note = 2'-O-methyladenosine-3'-phosphate
  modified_base 9: mod_base = OTHER; note = 2'-deoxy-2'-fluoroadenosine-3'-phosphate
  modified_base 10: mod_base = OTHER; note = 2'-deoxy-2'-fluoroguanosine-3'-phosphate
  modified_base 11: mod_base = OTHER; note = 2'-deoxy-2'-fluoroguanosine-3'-phosphate
  modified_base 12: mod_base = OTHER; note = 2'-O-methyluridine-3'-phosphate
  modified_base 13: mod_base = OTHER; note = 2'-O-methyladenosine-3'-phosphate
  modified_base 14: mod_base = OTHER; note = 2'-O-methylcytidine-3'-phosphate
  modified_base 15: mod_base = OTHER; note = 2'-O-methyluridine-3'-phosphate
  modified_base 16: mod_base = OTHER; note = 2'-O-methyluridine-3'-phosphate
  modified_base 17: mod_base = OTHER; note = 2'-O-methyluridine-3'-phosphate
  modified_base 18: mod_base = OTHER; note = 2'-O-methyluridine-3'-phosphate
  modified_base 19: mod_base = OTHER; note = 2'-O-methylguanosine-3'-phosphate
  modified_base 20: mod_base = OTHER; note = 2'-O-methylguanosine-3'-phosphate
  modified_base 21: mod_base = OTHER; note = 2'-O-methyladenosine
gaaacccaaggtacttttgga

SEQ ID NO: 4086 - RNA, 21 nt, synthetic construct
  source 1..21: mol_type = other RNA
  modified_base 1: mod_base = OTHER; note = 2'-O-methyladenosine-3'-phosphate
  modified_base 2: mod_base = OTHER; note = 2'-O-methyladenosine-3'-phosphate
  modified_base 3: mod_base = OTHER; note = 2'-O-methyladenosine-3'-phosphate
  modified_base 4: mod_base = OTHER; note = 2'-O-methylcytidine-3'-phosphate
  modified_base 5: mod_base = OTHER; note = 2'-O-methylcytidine-3'-phosphate
  modified_base 6: mod_base = OTHER; note = 2'-O-methylcytidine-3'-phosphate
  modified_base 7: mod_base = OTHER; note = 2'-deoxy-2'-fluoroadenosine-3'-phosphate
  modified_base 8: mod_base = OTHER; note = 2'-O-methyladenosine-3'-phosphate
  modified_base 9: mod_base = OTHER; note = 2'-deoxy-2'-fluoroguanosine-3'-phosphate
  modified_base 10: mod_base = OTHER; note = 2'-deoxy-2'-fluoroguanosine-3'-phosphate
  modified_base 11: mod_base = OTHER; note = 2'-deoxy-2'-fluorouridine-3'-phosphate
  modified_base 12: mod_base = OTHER; note = 2'-O-methyladenosine-3'-phosphate
  modified_base 13: mod_base = OTHER; note = 2'-O-methylcytidine-3'-phosphate
  modified_base 14: mod_base = OTHER; note = 2'-O-methyluridine-3'-phosphate
  modified_base 15: mod_base = OTHER; note = 2'-O-methyluridine-3'-phosphate
  modified_base 16: mod_base = OTHER; note = 2'-O-methyluridine-3'-phosphate
  modified_base 17: mod_base = OTHER; note = 2'-O-methyluridine-3'-phosphate
  modified_base 18: mod_base = OTHER; note = 2'-O-methylguanosine-3'-phosphate
  modified_base 19: mod_base = OTHER; note = 2'-O-methylguanosine-3'-phosphate
  modified_base 20: mod_base = OTHER; note = 2'-O-methyladenosine-3'-phosphate
  modified_base 21: mod_base = OTHER; note = 2'-O-methyladenosine
aaacccaaggtacttttggaa

SEQ ID NO: 4087 - RNA, 21 nt, synthetic construct
  source 1..21: mol_type = other RNA
  modified_base 1: mod_base = OTHER; note = 2'-O-methyladenosine-3'-phosphate
  modified_base 2: mod_base = OTHER; note = 2'-O-methyladenosine-3'-phosphate
  modified_base 3: mod_base = OTHER; note = 2'-O-methylcytidine-3'-phosphate
  modified_base 4: mod_base = OTHER; note = 2'-O-methylcytidine-3'-phosphate
  modified_base 5: mod_base = OTHER; note = 2'-O-methylcytidine-3'-phosphate
  modified_base 6: mod_base = OTHER; note = 2'-O-methyladenosine-3'-phosphate
  modified_base 7: mod_base = OTHER; note = 2'-deoxy-2'-fluoroadenosine-3'-phosphate
  modified_base 8: mod_base = OTHER; note = 2'-O-methylguanosine-3'-phosphate
  modified_base 9: mod_base = OTHER; note = 2'-deoxy-2'-fluoroguanosine-3'-phosphate
  modified_base 10: mod_base = OTHER; note = 2'-deoxy-2'-fluorouridine-3'-phosphate
  modified_base 11: mod_base = OTHER; note = 2'-deoxy-2'-fluoroadenosine-3'-phosphate
  modified_base 12: mod_base = OTHER; note = 2'-O-methylcytidine-3'-phosphate
  modified_base 13: mod_base = OTHER; note = 2'-O-methyluridine-3'-phosphate
  modified_base 14: mod_base = OTHER; note = 2'-O-methyluridine-3'-phosphate
  modified_base 15: mod_base = OTHER; note = 2'-O-methyluridine-3'-phosphate
  modified_base 16: mod_base = OTHER; note = 2'-O-methyluridine-3'-phosphate
  modified_base 17: mod_base = OTHER; note = 2'-O-methylguanosine-3'-phosphate
  modified_base 18: mod_base = OTHER; note = 2'-O-methylguanosine-3'-phosphate
  modified_base 19: mod_base = OTHER; note = 2'-O-methyladenosine-3'-phosphate
  modified_base 20: mod_base = OTHER; note = 2'-O-methylguanosine-3'-phosphate
  modified_base 21: mod_base = OTHER; note = 2'-O-methyladenosine
aacccaaggtacttttggaga

SEQ ID NO: 4088 - RNA, 21 nt, synthetic construct
  source 1..21: mol_type = other RNA
  modified_base 1: mod_base = OTHER; note = 2'-O-methyladenosine-3'-phosphate
  modified_base 2: mod_base = OTHER; note = 2'-O-methylcytidine-3'-phosphate
  modified_base 3: mod_base = OTHER; note = 2'-O-methylcytidine-3'-phosphate
  modified_base 4: mod_base = OTHER; note = 2'-O-methylcytidine-3'-phosphate
  modified_base 5: mod_base = OTHER; note = 2'-O-methyladenosine-3'-phosphate
  modified_base 6: mod_base = OTHER; note = 2'-O-methyladenosine-3'-phosphate
  modified_base 7: mod_base = OTHER; note = 2'-deoxy-2'-fluoroguanosine-3'-phosphate
  modified_base 8: mod_base = OTHER; note = 2'-O-methylguanosine-3'-phosphate
  modified_base 9: mod_base = OTHER; note = 2'-deoxy-2'-fluorouridine-3'-phosphate
  modified_base 10: mod_base = OTHER; note = 2'-deoxy-2'-fluoroadenosine-3'-phosphate
  modified_base 11: mod_base = OTHER; note = 2'-deoxy-2'-fluorocytidine-3'-phosphate
  modified_base 12: mod_base = OTHER; note = 2'-O-methyluridine-3'-phosphate
  modified_base 13: mod_base = OTHER; note = 2'-O-methyluridine-3'-phosphate
  modified_base 14: mod_base = OTHER; note = 2'-O-methyluridine-3'-phosphate
  modified_base 15: mod_base = OTHER; note = 2'-O-methyluridine-3'-phosphate
  modified_base 16: mod_base = OTHER; note = 2'-O-methylguanosine-3'-phosphate
  modified_base 17: mod_base = OTHER; note = 2'-O-methylguanosine-3'-phosphate
  modified_base 18: mod_base = OTHER; note = 2'-O-methyladenosine-3'-phosphate
  modified_base 19: mod_base = OTHER; note = 2'-O-methylguanosine-3'-phosphate
  modified_base 20: mod_base = OTHER; note = 2'-O-methylcytidine-3'-phosphate
  modified_base 21: mod_base = OTHER; note = 2'-O-methyladenosine
acccaaggtacttttggagca

SEQ ID NO: 4089 - RNA, 21 nt, synthetic construct
  source 1..21: mol_type = other RNA
  modified_base 1: mod_base = OTHER; note = 2'-O-methylcytidine-3'-phosphate
  modified_base 2: mod_base = OTHER; note = 2'-O-methylcytidine-3'-phosphate
  modified_base 3: mod_base = OTHER; note = 2'-O-methylcytidine-3'-phosphate
  modified_base 4: mod_base = OTHER; note = 2'-O-methyladenosine-3'-phosphate
  modified_base 5: mod_base = OTHER; note = 2'-O-methyladenosine-3'-phosphate
  modified_base 6: mod_base = OTHER; note = 2'-O-methylguanosine-3'-phosphate
  modified_base 7: mod_base = OTHER; note = 2'-deoxy-2'-fluoroguanosine-3'-phosphate
  modified_base 8: mod_base = OTHER; note = 2'-O-methyluridine-3'-phosphate
  modified_base 9: mod_base = OTHER; note = 2'-deoxy-2'-fluoroadenosine-3'-phosphate
  modified_base 10: mod_base = OTHER; note = 2'-deoxy-2'-fluorocytidine-3'-phosphate
  modified_base 11: mod_base = OTHER; note = 2'-deoxy-2'-fluorouridine-3'-phosphate
  modified_base 12: mod_base = OTHER; note = 2'-O-methyluridine-3'-phosphate
  modified_base 13: mod_base = OTHER; note = 2'-O-methyluridine-3'-phosphate
  modified_base 14: mod_base = OTHER; note = 2'-O-methyluridine-3'-phosphate
  modified_base 15: mod_base = OTHER; note = 2'-O-methylguanosine-3'-phosphate
  modified_base 16: mod_base = OTHER; note = 2'-O-methylguanosine-3'-phosphate
  modified_base 17: mod_base = OTHER; note = 2'-O-methyladenosine-3'-phosphate
  modified_base 18: mod_base = OTHER; note = 2'-O-methylguanosine-3'-phosphate
  modified_base 19: mod_base = OTHER; note = 2'-O-methylcytidine-3'-phosphate
  modified_base 20: mod_base = OTHER; note = 2'-O-methyluridine-3'-phosphate
  modified_base 21: mod_base = OTHER; note = 2'-O-methyladenosine
cccaaggtacttttggagcta

SEQ ID NO: 4090 - RNA, 21 nt, synthetic construct
  source 1..21: mol_type = other RNA
  modified_base 1: mod_base = OTHER; note = 2'-O-methylcytidine-3'-phosphate
  modified_base 2: mod_base = OTHER; note = 2'-O-methyladenosine-3'-phosphate
  modified_base 3: mod_base = OTHER; note = 2'-O-methyladenosine-3'-phosphate
  modified_base 4: mod_base = OTHER; note = 2'-O-methylguanosine-3'-phosphate
  modified_base 5: mod_base = OTHER; note = 2'-O-methylguanosine-3'-phosphate
  modified_base 6: mod_base = OTHER; note = 2'-O-methyluridine-3'-phosphate
  modified_base 7: mod_base = OTHER; note = 2'-deoxy-2'-fluoroadenosine-3'-phosphate
  modified_base 8: mod_base = OTHER; note = 2'-O-methylcytidine-3'-phosphate
  modified_base 9: mod_base = OTHER; note = 2'-deoxy-2'-fluorouridine-3'-phosphate
  modified_base 10: mod_base = OTHER; note = 2'-deoxy-2'-fluorouridine-3'-phosphate
  modified_base 11: mod_base = OTHER; note = 2'-deoxy-2'-fluorouridine-3'-phosphate
  modified_base 12: mod_base = OTHER; note = 2'-O-methyluridine-3'-phosphate
  modified_base 13: mod_base = OTHER; note = 2'-O-methylguanosine-3'-phosphate
  modified_base 14: mod_base = OTHER; note = 2'-O-methylguanosine-3'-phosphate
  modified_base 15: mod_base = OTHER; note = 2'-O-methyladenosine-3'-phosphate
  modified_base 16: mod_base = OTHER; note = 2'-O-methylguanosine-3'-phosphate
  modified_base 17: mod_base = OTHER; note = 2'-O-methylcytidine-3'-phosphate
  modified_base 18: mod_base = OTHER; note = 2'-O-methyluridine-3'-phosphate
  modified_base 19: mod_base = OTHER; note = 2'-O-methylguanosine-3'-phosphate
  modified_base 20: mod_base = OTHER; note = 2'-O-methylguanosine-3'-phosphate
  modified_base 21: mod_base = OTHER; note = 2'-O-methyladenosine
caaggtacttttggagctgga

SEQ ID NO: 4091 - RNA, 21 nt, synthetic construct
  source 1..21: mol_type = other RNA
  modified_base 1: mod_base = OTHER; note = 2'-O-methyladenosine-3'-phosphate
  modified_base 2: mod_base = OTHER; note = 2'-O-methylcytidine-3'-phosphate
  modified_base 3: mod_base = OTHER; note = 2'-O-methyluridine-3'-phosphate
  modified_base 4: mod_base = OTHER; note = 2'-O-methyluridine-3'-phosphate
  modified_base 5: mod_base = OTHER; note = 2'-O-methyluridine-3'-phosphate
  modified_base 6: mod_base = OTHER; note = 2'-O-methyluridine-3'-phosphate
  modified_base 7: mod_base = OTHER; note = 2'-deoxy-2'-fluoroguanosine-3'-phosphate
  modified_base 8: mod_base = OTHER; note = 2'-O-methylguanosine-3'-phosphate
  modified_base 9: mod_base = OTHER; note = 2'-deoxy-2'-fluoroadenosine-3'-phosphate
  modified_base 10: mod_base = OTHER; note = 2'-deoxy-2'-fluoroguanosine-3'-phosphate
  modified_base 11: mod_base = OTHER; note = 2'-deoxy-2'-fluorocytidine-3'-phosphate
  modified_base 12: mod_base = OTHER; note = 2'-O-methyluridine-3'-phosphate
  modified_base 13: mod_base = OTHER; note = 2'-O-methylguanosine-3'-phosphate
  modified_base 14: mod_base = OTHER; note = 2'-O-methylguanosine-3'-phosphate
  modified_base 15: mod_base = OTHER; note = 2'-O-methylcytidine-3'-phosphate
  modified_base 16: mod_base = OTHER; note = 2'-O-methylcytidine-3'-phosphate
  modified_base 17: mod_base = OTHER; note = 2'-O-methyluridine-3'-phosphate
  modified_base 18: mod_base = OTHER; note = 2'-O-methyluridine-3'-phosphate
  modified_base 19: mod_base = OTHER; note = 2'-O-methylcytidine-3'-phosphate
  modified_base 20: mod_base = OTHER; note = 2'-O-methyluridine-3'-phosphate
  modified_base 21: mod_base = OTHER; note = 2'-O-methyladenosine
acttttggagctggccttcta

SEQ ID NO: 4092 - RNA, 21 nt, synthetic construct
  source 1..21: mol_type = other RNA
  modified_base 1: mod_base = OTHER; note = 2'-O-methyluridine-3'-phosphate
  modified_base 2: mod_base = OTHER; note = 2'-O-methyluridine-3'-phosphate
  modified_base 3: mod_base = OTHER; note = 2'-O-methyluridine-3'-phosphate
  modified_base 4: mod_base = OTHER; note = 2'-O-methylguanosine-3'-phosphate
  modified_base 5: mod_base = OTHER; note = 2'-O-methylguanosine-3'-phosphate
  modified_base 6: mod_base = OTHER; note = 2'-O-methyladenosine-3'-phosphate
  modified_base 7: mod_base = OTHER; note = 2'-deoxy-2'-fluoroguanosine-3'-phosphate
  modified_base 8: mod_base = OTHER; note = 2'-O-methylcytidine-3'-phosphate
  modified_base 9: mod_base = OTHER; note = 2'-deoxy-2'-fluorouridine-3'-phosphate
  modified_base 10: mod_base = OTHER; note = 2'-deoxy-2'-fluoroguanosine-3'-phosphate
  modified_base 11: mod_base = OTHER; note = 2'-deoxy-2'-fluoroguanosine-3'-phosphate
  modified_base 12: mod_base = OTHER; note = 2'-O-methylcytidine-3'-phosphate
  modified_base 13: mod_base = OTHER; note = 2'-O-methylcytidine-3'-phosphate
  modified_base 14: mod_base = OTHER; note = 2'-O-methyluridine-3'-phosphate
  modified_base 15: mod_base = OTHER; note = 2'-O-methyluridine-3'-phosphate
  modified_base 16: mod_base = OTHER; note = 2'-O-methylcytidine-3'-phosphate
  modified_base 17: mod_base = OTHER; note = 2'-O-methyluridine-3'-phosphate
  modified_base 18: mod_base = OTHER; note = 2'-O-methylcytidine-3'-phosphate
  modified_base 19: mod_base = OTHER; note = 2'-O-methyladenosine-3'-phosphate
  modified_base 20: mod_base = OTHER; note = 2'-O-methyladenosine-3'-phosphate
  modified_base 21: mod_base = OTHER; note = 2'-O-methyladenosine
tttggagctggccttctcaaa

SEQ ID NO: 4093 - RNA, 21 nt, synthetic construct
  source 1..21: mol_type = other RNA
  modified_base 1: mod_base = OTHER; note = 2'-O-methyluridine-3'-phosphate
  modified_base 2: mod_base = OTHER; note = 2'-O-methyluridine-3'-phosphate
  modified_base 3: mod_base = OTHER; note = 2'-O-methylguanosine-3'-phosphate
  modified_base 4: mod_base = OTHER; note = 2'-O-methylguanosine-3'-phosphate
  modified_base 5: mod_base = OTHER; note = 2'-O-methyladenosine-3'-phosphate
  modified_base 6: mod_base = OTHER; note = 2'-O-methylguanosine-3'-phosphate
  modified_base 7: mod_base = OTHER; note = 2'-deoxy-2'-fluorocytidine-3'-phosphate
  modified_base 8: mod_base = OTHER; note = 2'-O-methyluridine-3'-phosphate
  modified_base 9: mod_base = OTHER; note = 2'-deoxy-2'-fluoroguanosine-3'-phosphate
  modified_base 10: mod_base = OTHER; note = 2'-deoxy-2'-fluoroguanosine-3'-phosphate
  modified_base 11: mod_base = OTHER; note = 2'-deoxy-2'-fluorocytidine-3'-phosphate
  modified_base 12: mod_base = OTHER; note = 2'-O-methylcytidine-3'-phosphate
  modified_base 13: mod_base = OTHER; note = 2'-O-methyluridine-3'-phosphate
  modified_base 14: mod_base = OTHER; note = 2'-O-methyluridine-3'-phosphate
  modified_base 15: mod_base = OTHER; note = 2'-O-methylcytidine-3'-phosphate
  modified_base 16: mod_base = OTHER; note = 2'-O-methyluridine-3'-phosphate
  modified_base 17: mod_base = OTHER; note = 2'-O-methylcytidine-3'-phosphate
  modified_base 18: mod_base = OTHER; note = 2'-O-methyladenosine-3'-phosphate
  modified_base 19: mod_base = OTHER; note = 2'-O-methyladenosine-3'-phosphate
  modified_base 20: mod_base = OTHER; note = 2'-O-methylguanosine-3'-phosphate
  modified_base 21: mod_base = OTHER; note = 2'-O-methyladenosine
ttggagctggccttctcaaga

SEQ ID NO: 4094 - RNA, 21 nt, synthetic construct
  source 1..21: mol_type = other RNA
  modified_base 1: mod_base = OTHER; note = 2'-O-methyluridine-3'-phosphate
  modified_base 2: mod_base = OTHER; note = 2'-O-methylguanosine-3'-phosphate
  modified_base 3: mod_base = OTHER; note = 2'-O-methylguanosine-3'-phosphate
  modified_base 4: mod_base = OTHER; note = 2'-O-methyladenosine-3'-phosphate
  modified_base 5: mod_base = OTHER; note = 2'-O-methylguanosine-3'-phosphate
  modified_base 6: mod_base = OTHER; note = 2'-O-methylcytidine-3'-phosphate
  modified_base 7: mod_base = OTHER; note = 2'-deoxy-2'-fluorouridine-3'-phosphate
  modified_base 8: mod_base = OTHER; note = 2'-O-methylguanosine-3'-phosphate
  modified_base 9: mod_base = OTHER; note = 2'-deoxy-2'-fluoroguanosine-3'-phosphate
  modified_base 10: mod_base = OTHER; note = 2'-deoxy-2'-fluorocytidine-3'-phosphate
  modified_base 11: mod_base = OTHER; note = 2'-deoxy-2'-fluorocytidine-3'-phosphate
  modified_base 12: mod_base = OTHER; note = 2'-O-methyluridine-3'-phosphate
  modified_base 13: mod_base = OTHER; note = 2'-O-methyluridine-3'-phosphate
  modified_base 14: mod_base = OTHER; note = 2'-O-methylcytidine-3'-phosphate
  modified_base 15: mod_base = OTHER; note = 2'-O-methyluridine-3'-phosphate
  modified_base 16: mod_base = OTHER; note = 2'-O-methylcytidine-3'-phosphate
  modified_base 17: mod_base = OTHER; note = 2'-O-methyladenosine-3'-phosphate
  modified_base 18: mod_base = OTHER; note = 2'-O-methyladenosine-3'-phosphate
  modified_base 19: mod_base = OTHER; note = 2'-O-methylguanosine-3'-phosphate
  modified_base 20: mod_base = OTHER; note = 2'-O-methylguanosine-3'-phosphate
  modified_base 21: mod_base = OTHER; note = 2'-O-methyladenosine
tggagctggccttctcaagga

SEQ ID NO: 4095 - RNA, 21 nt, synthetic construct
  source 1..21: mol_type = other RNA
  modified_base 1: mod_base = OTHER; note = 2'-O-methylguanosine-3'-phosphate
  modified_base 2: mod_base = OTHER; note = 2'-O-methylguanosine-3'-phosphate
  modified_base 3: mod_base = OTHER; note = 2'-O-methyladenosine-3'-phosphate
  modified_base 4: mod_base = OTHER; note = 2'-O-methylguanosine-3'-phosphate
  modified_base 5: mod_base = OTHER; note = 2'-O-methylcytidine-3'-phosphate
  modified_base 6: mod_base = OTHER; note = 2'-O-methyluridine-3'-phosphate
  modified_base 7: mod_base = OTHER; note = 2'-deoxy-2'-fluoroguanosine-3'-phosphate
  modified_base 8: mod_base = OTHER; note = 2'-O-methylguanosine-3'-phosphate
  modified_base 9: mod_base = OTHER; note = 2'-deoxy-2'-fluorocytidine-3'-phosphate
  modified_base 10: mod_base = OTHER; note = 2'-deoxy-2'-fluorocytidine-3'-phosphate
  modified_base 11: mod_base = OTHER; note = 2'-deoxy-2'-fluorouridine-3'-phosphate
  modified_base 12: mod_base = OTHER; note = 2'-O-methyluridine-3'-phosphate
  modified_base 13: mod_base = OTHER; note = 2'-O-methylcytidine-3'-phosphate
  modified_base 14: mod_base = OTHER; note = 2'-O-methyluridine-3'-phosphate
  modified_base 15: mod_base = OTHER; note = 2'-O-methylcytidine-3'-phosphate
  modified_base 16: mod_base = OTHER; note = 2'-O-methyladenosine-3'-phosphate
  modified_base 17: mod_base = OTHER; note = 2'-O-methyladenosine-3'-phosphate
  modified_base 18: mod_base = OTHER; note = 2'-O-methylguanosine-3'-phosphate
  modified_base 19: mod_base = OTHER; note = 2'-O-methylguanosine-3'-phosphate
  modified_base 20: mod_base = OTHER; note = 2'-O-methyladenosine-3'-phosphate
  modified_base 21: mod_base = OTHER; note = 2'-O-methyladenosine
ggagctggccttctcaaggaa

SEQ ID NO: 4096 - RNA, 21 nt, synthetic construct
  source 1..21: mol_type = other RNA
  modified_base 1: mod_base = OTHER; note = 2'-O-methylguanosine-3'-phosphate
  modified_base 2: mod_base = OTHER; note = 2'-O-methylguanosine-3'-phosphate
  modified_base 3: mod_base = OTHER; note = 2'-O-methyladenosine-3'-phosphate
  modified_base 4: mod_base = OTHER; note = 2'-O-methyladenosine-3'-phosphate
  modified_base 5: mod_base = OTHER; note = 2'-O-methylguanosine-3'-phosphate
  modified_base 6: mod_base = OTHER; note = 2'-O-methylcytidine-3'-phosphate
  modified_base 7: mod_base = OTHER; note = 2'-deoxy-2'-fluorocytidine-3'-phosphate
  modified_base 8: mod_base = OTHER; note = 2'-O-methylcytidine-3'-phosphate
  modified_base 9: mod_base = OTHER; note = 2'-deoxy-2'-fluoroadenosine-3'-phosphate
  modified_base 10: mod_base = OTHER; note = 2'-deoxy-2'-fluoroguanosine-3'-phosphate
  modified_base 11: mod_base = OTHER; note = 2'-deoxy-2'-fluorocytidine-3'-phosphate
  modified_base 12: mod_base = OTHER; note = 2'-O-methyluridine-3'-phosphate
  modified_base 13: mod_base = OTHER; note = 2'-O-methylcytidine-3'-phosphate
  modified_base 14: mod_base = OTHER; note = 2'-O-methylcytidine-3'-phosphate
  modified_base 15: mod_base = OTHER; note = 2'-O-methylcytidine-3'-phosphate
  modified_base 16: mod_base = OTHER; note = 2'-O-methyluridine-3'-phosphate
  modified_base 17: mod_base = OTHER; note = 2'-O-methylguanosine-3'-phosphate
  modified_base 18: mod_base = OTHER; note = 2'-O-methyluridine-3'-phosphate
  modified_base 19: mod_base = OTHER; note = 2'-O-methylguanosine-3'-phosphate
  modified_base 20: mod_base = OTHER; note = 2'-O-methyladenosine-3'-phosphate
  modified_base 21: mod_base = OTHER; note = 2'-O-methyladenosine
ggaagcccagctccctgtgaa

SEQ ID NO: 4097 - RNA, 21 nt, synthetic construct
  source 1..21: mol_type = other RNA
  modified_base 1: mod_base = OTHER; note = 2'-O-methylguanosine-3'-phosphate
  modified_base 2: mod_base = OTHER; note = 2'-O-methyladenosine-3'-phosphate
  modified_base 3: mod_base = OTHER; note = 2'-O-methyladenosine-3'-phosphate
  modified_base 4: mod_base = OTHER; note = 2'-O-methylguanosine-3'-phosphate
  modified_base 5: mod_base = OTHER; note = 2'-O-methylcytidine-3'-phosphate
  modified_base 6: mod_base = OTHER; note = 2'-O-methylcytidine-3'-phosphate
  modified_base 7: mod_base = OTHER; note = 2'-deoxy-2'-fluorocytidine-3'-phosphate
  modified_base 8: mod_base = OTHER; note = 2'-O-methyladenosine-3'-phosphate
  modified_base 9: mod_base = OTHER; note = 2'-deoxy-2'-fluoroguanosine-3'-phosphate
  modified_base 10: mod_base = OTHER; note = 2'-deoxy-2'-fluorocytidine-3'-phosphate
  modified_base 11: mod_base = OTHER; note = 2'-deoxy-2'-fluorouridine-3'-phosphate
  modified_base 12: mod_base = OTHER; note = 2'-O-methylcytidine-3'-phosphate
  modified_base 13: mod_base = OTHER; note = 2'-O-methylcytidine-3'-phosphate
  modified_base 14: mod_base = OTHER; note = 2'-O-methylcytidine-3'-phosphate
  modified_base 15: mod_base = OTHER; note = 2'-O-methyluridine-3'-phosphate
  modified_base 16: mod_base = OTHER; note = 2'-O-methylguanosine-3'-phosphate
  modified_base 17: mod_base = OTHER; note = 2'-O-methyluridine-3'-phosphate
  modified_base 18: mod_base = OTHER; note = 2'-O-methylguanosine-3'-phosphate
  modified_base 19: mod_base = OTHER; note = 2'-O-methyladenosine-3'-phosphate
  modified_base 20: mod_base = OTHER; note = 2'-O-methyluridine-3'-phosphate
  modified_base 21: mod_base = OTHER; note = 2'-O-methyladenosine
gaagcccagctccctgtgata

SEQ ID NO: 4098 - RNA, 21 nt, synthetic construct
  source 1..21: mol_type = other RNA
  modified_base 1: mod_base = OTHER; note = 2'-O-methyladenosine-3'-phosphate
  modified_base 2: mod_base = OTHER; note = 2'-O-methyladenosine-3'-phosphate
  modified_base 3: mod_base = OTHER; note = 2'-O-methylguanosine-3'-phosphate
  modified_base 4: mod_base = OTHER; note = 2'-O-methylcytidine-3'-phosphate
  modified_base 5: mod_base = OTHER; note = 2'-O-methylcytidine-3'-phosphate
  modified_base 6: mod_base = OTHER; note = 2'-O-methylcytidine-3'-phosphate
  modified_base 7: mod_base = OTHER; note = 2'-deoxy-2'-fluoroadenosine-3'-phosphate
  modified_base 8: mod_base = OTHER; note = 2'-O-methylguanosine-3'-phosphate
  modified_base 9: mod_base = OTHER; note = 2'-deoxy-2'-fluorocytidine-3'-phosphate
  modified_base 10: mod_base = OTHER; note = 2'-deoxy-2'-fluorouridine-3'-phosphate
  modified_base 11: mod_base = OTHER; note = 2'-deoxy-2'-fluorocytidine-3'-phosphate
  modified_base 12: mod_base = OTHER; note = 2'-O-methylcytidine-3'-phosphate
  modified_base 13: mod_base = OTHER; note = 2'-O-methylcytidine-3'-phosphate
  modified_base 14: mod_base = OTHER; note = 2'-O-methyluridine-3'-phosphate
  modified_base 15: mod_base = OTHER; note = 2'-O-methylguanosine-3'-phosphate
  modified_base 16: mod_base = OTHER; note = 2'-O-methyluridine-3'-phosphate
  modified_base 17: mod_base = OTHER; note = 2'-O-methylguanosine-3'-phosphate
  modified_base 18: mod_base = OTHER; note = 2'-O-methyladenosine-3'-phosphate
  modified_base 19: mod_base = OTHER; note = 2'-O-methyluridine-3'-phosphate
  modified_base 20: mod_base = OTHER; note = 2'-O-methyluridine-3'-phosphate
  modified_base 21: mod_base = OTHER; note = 2'-O-methyladenosine
aagcccagctccctgtgatta

SEQ ID NO: 4099 - RNA, 21 nt, synthetic construct
  source 1..21: mol_type = other RNA
  modified_base 1: mod_base = OTHER; note = 2'-O-methyladenosine-3'-phosphate
  modified_base 2: mod_base = OTHER; note = 2'-O-methylguanosine-3'-phosphate
  modified_base 3: mod_base = OTHER; note = 2'-O-methylcytidine-3'-phosphate
  modified_base 4: mod_base = OTHER; note = 2'-O-methylcytidine-3'-phosphate
  modified_base 5: mod_base = OTHER; note = 2'-O-methylcytidine-3'-phosphate
  modified_base 6: mod_base = OTHER; note = 2'-O-methyladenosine-3'-phosphate
  modified_base 7: mod_base = OTHER; note = 2'-deoxy-2'-fluoroguanosine-3'-phosphate
  modified_base 8: mod_base = OTHER; note = 2'-O-methylcytidine-3'-phosphate
  modified_base 9: mod_base = OTHER; note = 2'-deoxy-2'-fluorouridine-3'-phosphate
  modified_base 10: mod_base = OTHER; note = 2'-deoxy-2'-fluorocytidine-3'-phosphate
  modified_base 11: mod_base = OTHER; note = 2'-deoxy-2'-fluorocytidine-3'-phosphate
  modified_base 12: mod_base = OTHER; note = 2'-O-methylcytidine-3'-phosphate
  modified_base 13: mod_base = OTHER; note = 2'-O-methyluridine-3'-phosphate
  modified_base 14: mod_base = OTHER; note = 2'-O-methylguanosine-3'-phosphate
  modified_base 15: mod_base = OTHER; note = 2'-O-methyluridine-3'-phosphate
  modified_base 16: mod_base = OTHER; note = 2'-O-methylguanosine-3'-phosphate
  modified_base 17: mod_base = OTHER; note = 2'-O-methyladenosine-3'-phosphate
  modified_base 18: mod_base = OTHER; note = 2'-O-methyluridine-3'-phosphate
  modified_base 19: mod_base = OTHER; note = 2'-O-methyluridine-3'-phosphate
  modified_base 20: mod_base = OTHER; note = 2'-O-methylguanosine-3'-phosphate
  modified_base 21: mod_base = OTHER; note = 2'-O-methyladenosine
agcccagctccctgtgattga

SEQ ID NO: 4100 - RNA, 21 nt, synthetic construct
  source 1..21: mol_type = other RNA
  modified_base 1: mod_base = OTHER; note = 2'-O-methylguanosine-3'-phosphate
  modified_base 2: mod_base = OTHER; note = 2'-O-methylcytidine-3'-phosphate
  modified_base 3: mod_base = OTHER; note = 2'-O-methylcytidine-3'-phosphate
  modified_base 4: mod_base = OTHER; note = 2'-O-methylcytidine-3'-phosphate
  modified_base 5: mod_base = OTHER; note = 2'-O-methyladenosine-3'-phosphate
  modified_base 6: mod_base = OTHER; note = 2'-O-methylguanosine-3'-phosphate
  modified_base 7: mod_base = OTHER; note = 2'-deoxy-2'-fluorocytidine-3'-phosphate
  modified_base 8: mod_base = OTHER; note = 2'-O-methyluridine-3'-phosphate
  modified_base 9: mod_base = OTHER; note = 2'-deoxy-2'-fluorocytidine-3'-phosphate
  modified_base 10: mod_base = OTHER; note = 2'-deoxy-2'-fluorocytidine-3'-phosphate
  modified_base 11: mod_base = OTHER; note = 2'-deoxy-2'-fluorocytidine-3'-phosphate
  modified_base 12: mod_base = OTHER; note = 2'-O-methyluridine-3'-phosphate
  modified_base 13: mod_base = OTHER; note = 2'-O-methylguanosine-3'-phosphate
  modified_base 14: mod_base = OTHER; note = 2'-O-methyluridine-3'-phosphate
  modified_base 15: mod_base = OTHER; note = 2'-O-methylguanosine-3'-phosphate
  modified_base 16: mod_base = OTHER; note = 2'-O-methyladenosine-3'-phosphate
  modified_base 17: mod_base = OTHER; note = 2'-O-methyluridine-3'-phosphate
  modified_base 18: mod_base = OTHER; note = 2'-O-methyluridine-3'-phosphate
  modified_base 19: mod_base = OTHER; note = 2'-O-methylguanosine-3'-phosphate
  modified_base 20: mod_base = OTHER; note = 2'-O-methyladenosine-3'-phosphate
  modified_base 21: mod_base = OTHER; note = 2'-O-methyladenosine
gcccagctccctgtgattgaa

SEQ ID NO: 4101 - RNA, 21 nt, synthetic construct
  source 1..21: mol_type = other RNA
  modified_base 1: mod_base = OTHER; note = 2'-O-methylcytidine-3'-phosphate
  modified_base 2: mod_base = OTHER; note = 2'-O-methylcytidine-3'-phosphate
  modified_base 3: mod_base = OTHER; note = 2'-O-methylcytidine-3'-phosphate
  modified_base 4: mod_base = OTHER; note = 2'-O-methyladenosine-3'-phosphate
  modified_base 5: mod_base = OTHER; note = 2'-O-methylguanosine-3'-phosphate
  modified_base 6: mod_base = OTHER; note = 2'-O-methylcytidine-3'-phosphate
  modified_base 7: mod_base = OTHER; note = 2'-deoxy-2'-fluorouridine-3'-phosphate
  modified_base 8: mod_base = OTHER; note = 2'-O-methylcytidine-3'-phosphate
  modified_base 9: mod_base = OTHER; note = 2'-deoxy-2'-fluorocytidine-3'-phosphate
  modified_base 10: mod_base = OTHER; note = 2'-deoxy-2'-fluorocytidine-3'-phosphate
  modified_base 11: mod_base = OTHER; note = 2'-deoxy-2'-fluorouridine-3'-phosphate
  modified_base 12: mod_base = OTHER; note = 2'-O-methylguanosine-3'-phosphate
  modified_base 13: mod_base = OTHER; note = 2'-O-methyluridine-3'-phosphate
  modified_base 14: mod_base = OTHER; note = 2'-O-methylguanosine-3'-phosphate
  modified_base 15: mod_base = OTHER; note = 2'-O-methyladenosine-3'-phosphate
  modified_base 16: mod_base = OTHER; note = 2'-O-methyluridine-3'-phosphate
  modified_base 17: mod_base = OTHER; note = 2'-O-methyluridine-3'-phosphate
  modified_base 18: mod_base = OTHER; note = 2'-O-methylguanosine-3'-phosphate
  modified_base 19: mod_base = OTHER; note = 2'-O-methyladenosine-3'-phosphate
  modified_base 20: mod_base = OTHER; note = 2'-O-methylguanosine-3'-phosphate
  modified_base 21: mod_base = OTHER; note = 2'-O-methyladenosine
cccagctccctgtgattgaga

SEQ ID NO: 4102 - RNA, 21 nt, synthetic construct
  source 1..21: mol_type = other RNA
  modified_base 1: mod_base = OTHER; note = 2'-O-methylcytidine-3'-phosphate
  modified_base 2: mod_base = OTHER; note = 2'-O-methylcytidine-3'-phosphate
  modified_base 3: mod_base = OTHER; note = 2'-O-methyladenosine-3'-phosphate
  modified_base 4: mod_base = OTHER; note = 2'-O-methylguanosine-3'-phosphate
  modified_base 5: mod_base = OTHER; note = 2'-O-methylcytidine-3'-phosphate
  modified_base 6: mod_base = OTHER; note = 2'-O-methyluridine-3'-phosphate
  modified_base 7: mod_base = OTHER; note = 2'-deoxy-2'-fluorocytidine-3'-phosphate
  modified_base 8: mod_base = OTHER; note = 2'-O-methylcytidine-3'-phosphate
  modified_base 9: mod_base = OTHER; note = 2'-deoxy-2'-fluorocytidine-3'-phosphate
  modified_base 10: mod_base = OTHER; note = 2'-deoxy-2'-fluorouridine-3'-phosphate
  modified_base 11: mod_base = OTHER; note = 2'-deoxy-2'-fluoroguanosine-3'-phosphate
  modified_base 12: mod_base = OTHER; note = 2'-O-methyluridine-3'-phosphate
  modified_base 13: mod_base = OTHER; note = 2'-O-methylguanosine-3'-phosphate
  modified_base 14: mod_base = OTHER; note = 2'-O-methyladenosine-3'-phosphate
  modified_base 15: mod_base = OTHER; note = 2'-O-methyluridine-3'-phosphate
  modified_base 16: mod_base = OTHER; note = 2'-O-methyluridine-3'-phosphate
  modified_base 17: mod_base = OTHER; note = 2'-O-methylguanosine-3'-phosphate
  modified_base 18: mod_base = OTHER; note = 2'-O-methyladenosine-3'-phosphate
  modified_base 19: mod_base = OTHER; note = 2'-O-methylguanosine-3'-phosphate
  modified_base 20: mod_base = OTHER; note = 2'-O-methyladenosine-3'-phosphate
  modified_base 21: mod_base = OTHER; note = 2'-O-methyladenosine
ccagctccctgtgattgagaa

SEQ ID NO: 4103 - RNA, 21 nt, synthetic construct
  source 1..21: mol_type = other RNA
  modified_base 1: mod_base = OTHER; note = 2'-O-methylcytidine-3'-phosphate
  modified_base 2: mod_base = OTHER; note = 2'-O-methyladenosine-3'-phosphate
  modified_base 3: mod_base = OTHER; note = 2'-O-methylguanosine-3'-phosphate
  modified_base 4: mod_base = OTHER; note = 2'-O-methylcytidine-3'-phosphate
  modified_base 5: mod_base = OTHER; note = 2'-O-methyluridine-3'-phosphate
  modified_base 6: mod_base = OTHER; note = 2'-O-methylcytidine-3'-phosphate
  modified_base 7: mod_base = OTHER; note = 2'-deoxy-2'-fluorocytidine-3'-phosphate
  modified_base 8: mod_base = OTHER; note = 2'-O-methylcytidine-3'-phosphate
  modified_base 9: mod_base = OTHER; note = 2'-deoxy-2'-fluorouridine-3'-phosphate
  modified_base 10: mod_base = OTHER; note = 2'-deoxy-2'-fluoroguanosine-3'-phosphate
  modified_base 11: mod_base = OTHER; note = 2'-deoxy-2'-fluorouridine-3'-phosphate
  modified_base 12: mod_base = OTHER; note = 2'-O-methylguanosine-3'-phosphate
  modified_base 13: mod_base = OTHER; note = 2'-O-methyladenosine-3'-phosphate
  modified_base 14: mod_base = OTHER; note = 2'-O-methyluridine-3'-phosphate
  modified_base 15: mod_base = OTHER; note = 2'-O-methyluridine-3'-phosphate
  modified_base 16: mod_base = OTHER; note = 2'-O-methylguanosine-3'-phosphate
  modified_base 17: mod_base = OTHER; note = 2'-O-methyladenosine-3'-phosphate
  modified_base 18: mod_base = OTHER; note = 2'-O-methylguanosine-3'-phosphate
  modified_base 19: mod_base = OTHER; note = 2'-O-methyladenosine-3'-phosphate
  modified_base 20: mod_base = OTHER; note = 2'-O-methyladenosine-3'-phosphate
  modified_base 21: mod_base = OTHER; note = 2'-O-methyladenosine
cagctccctgtgattgagaaa

SEQ ID NO: 4104 - RNA, 21 nt, synthetic construct
  source 1..21: mol_type = other RNA
  modified_base 1: mod_base = OTHER; note = 2'-O-methyladenosine-3'-phosphate
  modified_base 2: mod_base = OTHER; note = 2'-O-methylguanosine-3'-phosphate
  modified_base 3: mod_base = OTHER; note = 2'-O-methylcytidine-3'-phosphate
  modified_base 4: mod_base = OTHER; note = 2'-O-methyluridine-3'-phosphate
  modified_base 5: mod_base = OTHER; note = 2'-O-methylcytidine-3'-phosphate
  modified_base 6: mod_base = OTHER; note = 2'-O-methylcytidine-3'-phosphate
  modified_base 7: mod_base = OTHER; note = 2'-deoxy-2'-fluorocytidine-3'-phosphate
  modified_base 8: mod_base = OTHER; note = 2'-O-methyluridine-3'-phosphate
  modified_base 9: mod_base = OTHER; note = 2'-deoxy-2'-fluoroguanosine-3'-phosphate
  modified_base 10: mod_base = OTHER; note = 2'-deoxy-2'-fluorouridine-3'-phosphate
  modified_base 11: mod_base = OTHER; note = 2'-deoxy-2'-fluoroguanosine-3'-phosphate
  modified_base 12: mod_base = OTHER; note = 2'-O-methyladenosine-3'-phosphate
  modified_base 13: mod_base = OTHER; note = 2'-O-methyluridine-3'-phosphate
  modified_base 14: mod_base = OTHER; note = 2'-O-methyluridine-3'-phosphate
  modified_base 15: mod_base = OTHER; note = 2'-O-methylguanosine-3'-phosphate
  modified_base 16: mod_base = OTHER; note = 2'-O-methyladenosine-3'-phosphate
  modified_base 17: mod_base = OTHER; note = 2'-O-methylguanosine-3'-phosphate
  modified_base 18: mod_base = OTHER; note = 2'-O-methyladenosine-3'-phosphate
  modified_base 19: mod_base = OTHER; note = 2'-O-methyladenosine-3'-phosphate
  modified_base 20: mod_base = OTHER; note = 2'-O-methyluridine-3'-phosphate
  modified_base 21: mod_base = OTHER; note = 2'-O-methyladenosine
agctccctgtgattgagaata

SEQ ID NO: 4105 - RNA, 21 nt, synthetic construct
  source 1..21: mol_type = other RNA
  modified_base 1: mod_base = OTHER; note = 2'-O-methylguanosine-3'-phosphate
  modified_base 2: mod_base = OTHER; note = 2'-O-methylcytidine-3'-phosphate
  modified_base 3: mod_base = OTHER; note = 2'-O-methyluridine-3'-phosphate
  modified_base 4: mod_base = OTHER; note = 2'-O-methylcytidine-3'-phosphate
  modified_base 5: mod_base = OTHER; note = 2'-O-methylcytidine-3'-phosphate
  modified_base 6: mod_base = OTHER; note = 2'-O-methylcytidine-3'-phosphate
  modified_base 7: mod_base = OTHER; note = 2'-deoxy-2'-fluorouridine-3'-phosphate
  modified_base 8: mod_base = OTHER; note = 2'-O-methylguanosine-3'-phosphate
  modified_base 9: mod_base = OTHER; note = 2'-deoxy-2'-fluorouridine-3'-phosphate
  modified_base 10: mod_base = OTHER; note = 2'-deoxy-2'-fluoroguanosine-3'-phosphate
  modified_base 11: mod_base = OTHER; note = 2'-deoxy-2'-fluoroadenosine-3'-phosphate
  modified_base 12: mod_base = OTHER; note = 2'-O-methyluridine-3'-phosphate
  modified_base 13: mod_base = OTHER; note = 2'-O-methyluridine-3'-phosphate
  modified_base 14: mod_base = OTHER; note = 2'-O-methylguanosine-3'-phosphate
  modified_base 15: mod_base = OTHER; note = 2'-O-methyladenosine-3'-phosphate
  modified_base 16: mod_base = OTHER; note = 2'-O-methylguanosine-3'-phosphate
  modified_base 17: mod_base = OTHER; note = 2'-O-methyladenosine-3'-phosphate
  modified_base 18: mod_base = OTHER; note = 2'-O-methyladenosine-3'-phosphate
  modified_base 19: mod_base = OTHER; note = 2'-O-methyluridine-3'-phosphate
  modified_base 20: mod_base = OTHER; note = 2'-O-methyladenosine-3'-phosphate
  modified_base 21: mod_base = OTHER; note = 2'-O-methyladenosine
gctccctgtgattgagaataa

SEQ ID NO: 4106 - RNA, 21 nt, synthetic construct
  source 1..21: mol_type = other RNA
  modified_base 1: mod_base = OTHER; note = 2'-O-methylcytidine-3'-phosphate
  modified_base 2: mod_base = OTHER; note = 2'-O-methyluridine-3'-phosphate
  modified_base 3: mod_base = OTHER; note = 2'-O-methylcytidine-3'-phosphate
  modified_base 4: mod_base = OTHER; note = 2'-O-methylcytidine-3'-phosphate
  modified_base 5: mod_base = OTHER; note = 2'-O-methylcytidine-3'-phosphate
  modified_base 6: mod_base = OTHER; note = 2'-O-methyluridine-3'-phosphate
  modified_base 7: mod_base = OTHER; note = 2'-deoxy-2'-fluoroguanosine-3'-phosphate
  modified_base 8: mod_base = OTHER; note = 2'-O-methyluridine-3'-phosphate
  modified_base 9: mod_base = OTHER; note = 2'-deoxy-2'-fluoroguanosine-3'-phosphate
  modified_base 10: mod_base = OTHER; note = 2'-deoxy-2'-fluoroadenosine-3'-phosphate
  modified_base 11: mod_base = OTHER; note = 2'-deoxy-2'-fluorouridine-3'-phosphate
  modified_base 12: mod_base = OTHER; note = 2'-O-methyluridine-3'-phosphate
  modified_base 13: mod_base = OTHER; note = 2'-O-methylguanosine-3'-phosphate
  modified_base 14: mod_base = OTHER; note = 2'-O-methyladenosine-3'-phosphate
  modified_base 15: mod_base = OTHER; note = 2'-O-methylguanosine-3'-phosphate
  modified_base 16: mod_base = OTHER; note = 2'-O-methyladenosine-3'-phosphate
  modified_base 17: mod_base = OTHER; note = 2'-O-methyladenosine-3'-phosphate
  modified_base 18: mod_base = OTHER; note = 2'-O-methyluridine-3'-phosphate
  modified_base 19: mod_base = OTHER; note = 2'-O-methyladenosine-3'-phosphate
  modified_base 20: mod_base = OTHER; note = 2'-O-methyladenosine-3'-phosphate
  modified_base 21: mod_base = OTHER; note = 2'-O-methyladenosine
ctccctgtgattgagaataaa

SEQ ID NO: 4107 - RNA, 21 nt, synthetic construct
  source 1..21: mol_type = other RNA
  modified_base 1: mod_base = OTHER; note = 2'-O-methyluridine-3'-phosphate
  modified_base 2: mod_base = OTHER; note = 2'-O-methylcytidine-3'-phosphate
  modified_base 3: mod_base = OTHER; note = 2'-O-methylcytidine-3'-phosphate
  modified_base 4: mod_base = OTHER; note = 2'-O-methylcytidine-3'-phosphate
  modified_base 5: mod_base = OTHER; note = 2'-O-methyluridine-3'-phosphate
  modified_base 6: mod_base = OTHER; note = 2'-O-methylguanosine-3'-phosphate
  modified_base 7: mod_base = OTHER; note = 2'-deoxy-2'-fluorouridine-3'-phosphate
  modified_base 8: mod_base = OTHER; note = 2'-O-methylguanosine-3'-phosphate
  modified_base 9: mod_base = OTHER; note = 2'-deoxy-2'-fluoroadenosine-3'-phosphate
  modified_base 10: mod_base = OTHER; note = 2'-deoxy-2'-fluorouridine-3'-phosphate
  modified_base 11: mod_base = OTHER; note = 2'-deoxy-2'-fluorouridine-3'-phosphate
  modified_base 12: mod_base = OTHER; note = 2'-O-methylguanosine-3'-phosphate
  modified_base 13: mod_base = OTHER; note = 2'-O-methyladenosine-3'-phosphate
  modified_base 14: mod_base = OTHER; note = 2'-O-methylguanosine-3'-phosphate
  modified_base 15: mod_base = OTHER; note = 2'-O-methyladenosine-3'-phosphate
  modified_base 16: mod_base = OTHER; note = 2'-O-methyladenosine-3'-phosphate
  modified_base 17: mod_base = OTHER; note = 2'-O-methyluridine-3'-phosphate
  modified_base 18: mod_base = OTHER; note = 2'-O-methyladenosine-3'-phosphate
  modified_base 19: mod_base = OTHER; note = 2'-O-methyladenosine-3'-phosphate
  modified_base 20: mod_base = OTHER; note = 2'-O-methyladenosine-3'-phosphate
  modified_base 21: mod_base = OTHER; note = 2'-O-methyladenosine
tccctgtgattgagaataaaa

SEQ ID NO: 4108 - RNA, 21 nt, synthetic construct
  source 1..21: mol_type = other RNA
  modified_base 1: mod_base = OTHER; note = 2'-O-methylcytidine-3'-phosphate
  modified_base 2: mod_base = OTHER; note = 2'-O-methylcytidine-3'-phosphate
  modified_base 3: mod_base = OTHER; note = 2'-O-methylcytidine-3'-phosphate
  modified_base 4: mod_base = OTHER; note = 2'-O-methyluridine-3'-phosphate
  modified_base 5: mod_base = OTHER; note = 2'-O-methylguanosine-3'-phosphate
  modified_base 6: mod_base = OTHER; note = 2'-O-methyluridine-3'-phosphate
  modified_base 7: mod_base = OTHER; note = 2'-deoxy-2'-fluoroguanosine-3'-phosphate
  modified_base 8: mod_base = OTHER; note = 2'-O-methyladenosine-3'-phosphate
  modified_base 9: mod_base = OTHER; note = 2'-deoxy-2'-fluorouridine-3'-phosphate
  modified_base 10: mod_base = OTHER; note = 2'-deoxy-2'-fluorouridine-3'-phosphate
  modified_base 11: mod_base = OTHER; note = 2'-deoxy-2'-fluoroguanosine-3'-phosphate
  modified_base 12: mod_base = OTHER; note = 2'-O-methyladenosine-3'-phosphate
  modified_base 13: mod_base = OTHER; note = 2'-O-methylguanosine-3'-phosphate
  modified_base 14: mod_base = OTHER; note = 2'-O-methyladenosine-3'-phosphate
  modified_base 15: mod_base = OTHER; note = 2'-O-methyladenosine-3'-phosphate
  modified_base 16: mod_base = OTHER; note = 2'-O-methyluridine-3'-phosphate
  modified_base 17: mod_base = OTHER; note = 2'-O-methyladenosine-3'-phosphate
  modified_base 18: mod_base = OTHER; note = 2'-O-methyladenosine-3'-phosphate
  modified_base 19: mod_base = OTHER; note = 2'-O-methyladenosine-3'-phosphate
  modified_base 20: mod_base = OTHER; note = 2'-O-methylguanosine-3'-phosphate
  modified_base 21: mod_base = OTHER; note = 2'-O-methyladenosine
ccctgtgattgagaataaaga

SEQ ID NO: 4109 - RNA, 21 nt, synthetic construct
  source 1..21: mol_type = other RNA
  modified_base 1: mod_base = OTHER; note = 2'-O-methylcytidine-3'-phosphate
  modified_base 2: mod_base = OTHER; note = 2'-O-methylcytidine-3'-phosphate
  modified_base 3: mod_base = OTHER; note = 2'-O-methyluridine-3'-phosphate
  modified_base 4: mod_base = OTHER; note = 2'-O-methylguanosine-3'-phosphate
  modified_base 5: mod_base = OTHER; note = 2'-O-methyluridine-3'-phosphate
  modified_base 6: mod_base = OTHER; note = 2'-O-methylguanosine-3'-phosphate
  modified_base 7: mod_base = OTHER; note = 2'-deoxy-2'-fluoroadenosine-3'-phosphate
  modified_base 8: mod_base = OTHER; note = 2'-O-methyluridine-3'-phosphate
  modified_base 9: mod_base = OTHER; note = 2'-deoxy-2'-fluorouridine-3'-phosphate
  modified_base 10: mod_base = OTHER; note = 2'-deoxy-2'-fluoroguanosine-3'-phosphate
  modified_base 11: mod_base = OTHER; note = 2'-deoxy-2'-fluoroadenosine-3'-phosphate
  modified_base 12: mod_base = OTHER; note = 2'-O-methylguanosine-3'-phosphate
  modified_base 13: mod_base = OTHER; note = 2'-O-methyladenosine-3'-phosphate
  modified_base 14: mod_base = OTHER; note = 2'-O-methyladenosine-3'-phosphate
  modified_base 15: mod_base = OTHER; note = 2'-O-methyluridine-3'-phosphate
  modified_base 16: mod_base = OTHER; note = 2'-O-methyladenosine-3'-phosphate
  modified_base 17: mod_base = OTHER; note = 2'-O-methyladenosine-3'-phosphate
  modified_base 18: mod_base = OTHER; note = 2'-O-methyladenosine-3'-phosphate
  modified_base 19: mod_base = OTHER; note = 2'-O-methylguanosine-3'-phosphate
  modified_base 20: mod_base = OTHER; note = 2'-O-methyluridine-3'-phosphate
  modified_base 21: mod_base = OTHER; note = 2'-O-methyladenosine
cctgtgattgagaataaagta

SEQ ID NO: 4110 - RNA, 21 nt, synthetic construct
  source 1..21: mol_type = other RNA
  modified_base 1: mod_base = OTHER; note = 2'-O-methylcytidine-3'-phosphate
  modified_base 2: mod_base = OTHER; note = 2'-O-methyluridine-3'-phosphate
  modified_base 3: mod_base = OTHER; note = 2'-O-methylguanosine-3'-phosphate
  modified_base 4: mod_base = OTHER; note = 2'-O-methyluridine-3'-phosphate
  modified_base 5: mod_base = OTHER; note = 2'-O-methylguanosine-3'-phosphate
  modified_base 6: mod_base = OTHER; note = 2'-O-methyladenosine-3'-phosphate
  modified_base 7: mod_base = OTHER; note = 2'-deoxy-2'-fluorouridine-3'-phosphate
  modified_base 8: mod_base = OTHER; note = 2'-O-methyluridine-3'-phosphate
  modified_base 9: mod_base = OTHER; note = 2'-deoxy-2'-fluoroguanosine-3'-phosphate
  modified_base 10: mod_base = OTHER; note = 2'-deoxy-2'-fluoroadenosine-3'-phosphate
  modified_base 11: mod_base = OTHER; note = 2'-deoxy-2'-fluoroguanosine-3'-phosphate
  modified_base 12: mod_base = OTHER; note = 2'-O-methyladenosine-3'-phosphate
  modified_base 13: mod_base = OTHER; note = 2'-O-methyladenosine-3'-phosphate
  modified_base 14: mod_base = OTHER; note = 2'-O-methyluridine-3'-phosphate
  modified_base 15: mod_base = OTHER; note = 2'-O-methyladenosine-3'-phosphate
  modified_base 16: mod_base = OTHER; note = 2'-O-methyladenosine-3'-phosphate
  modified_base 17: mod_base = OTHER; note = 2'-O-methyladenosine-3'-phosphate
  modified_base 18: mod_base = OTHER; note = 2'-O-methylguanosine-3'-phosphate
  modified_base 19: mod_base = OTHER; note = 2'-O-methyluridine-3'-phosphate
  modified_base 20: mod_base = OTHER; note = 2'-O-methylguanosine-3'-phosphate
  modified_base 21: mod_base = OTHER; note = 2'-O-methyladenosine
ctgtgattgagaataaagtga

SEQ ID NO: 4111 - RNA, 21 nt, synthetic construct
  source 1..21: mol_type = other RNA
  modified_base 1: mod_base = OTHER; note = 2'-O-methyluridine-3'-phosphate
  modified_base 2: mod_base = OTHER; note = 2'-O-methylguanosine-3'-phosphate
  modified_base 3: mod_base = OTHER; note = 2'-O-methyluridine-3'-phosphate
  modified_base 4: mod_base = OTHER; note = 2'-O-methylguanosine-3'-phosphate
  modified_base 5: mod_base = OTHER; note = 2'-O-methyladenosine-3'-phosphate
  modified_base 6: mod_base = OTHER; note = 2'-O-methyluridine-3'-phosphate
  modified_base 7: mod_base = OTHER; note = 2'-deoxy-2'-fluorouridine-3'-phosphate
  modified_base 8: mod_base = OTHER; note = 2'-O-methylguanosine-3'-phosphate
  modified_base 9: mod_base = OTHER; note = 2'-deoxy-2'-fluoroadenosine-3'-phosphate
  modified_base 10: mod_base = OTHER; note = 2'-deoxy-2'-fluoroguanosine-3'-phosphate
  modified_base 11: mod_base = OTHER; note = 2'-deoxy-2'-fluoroadenosine-3'-phosphate
  modified_base 12: mod_base = OTHER; note = 2'-O-methyladenosine-3'-phosphate
  modified_base 13: mod_base = OTHER; note = 2'-O-methyluridine-3'-phosphate
  modified_base 14: mod_base = OTHER; note = 2'-O-methyladenosine-3'-phosphate
  modified_base 15: mod_base = OTHER; note = 2'-O-methyladenosine-3'-phosphate
  modified_base 16: mod_base = OTHER; note = 2'-O-methyladenosine-3'-phosphate
  modified_base 17: mod_base = OTHER; note = 2'-O-methylguanosine-3'-phosphate
  modified_base 18: mod_base = OTHER; note = 2'-O-methyluridine-3'-phosphate
  modified_base 19: mod_base = OTHER; note = 2'-O-methylguanosine-3'-phosphate
  modified_base 20: mod_base = OTHER; note = 2'-O-methyluridine-3'-phosphate
  modified_base 21: mod_base = OTHER; note = 2'-O-methyladenosine
tgtgattgagaataaagtgta

SEQ ID NO: 4112 - RNA, 21 nt, synthetic construct
  source 1..21: mol_type = other RNA
  modified_base 1: mod_base = OTHER; note = 2'-O-methylguanosine-3'-phosphate
  modified_base 2: mod_base = OTHER; note = 2'-O-methyluridine-3'-phosphate
  modified_base 3: mod_base = OTHER; note = 2'-O-methylguanosine-3'-phosphate
  modified_base 4: mod_base = OTHER; note = 2'-O-methyladenosine-3'-phosphate
  modified_base 5: mod_base = OTHER; note = 2'-O-methyluridine-3'-phosphate
  modified_base 6: mod_base = OTHER; note = 2'-O-methyluridine-3'-phosphate
  modified_base 7: mod_base = OTHER; note = 2'-deoxy-2'-fluoroguanosine-3'-phosphate
  modified_base 8: mod_base = OTHER; note = 2'-O-methyladenosine-3'-phosphate
  modified_base 9: mod_base = OTHER; note = 2'-deoxy-2'-fluoroguanosine-3'-phosphate
  modified_base 10: mod_base = OTHER; note = 2'-deoxy-2'-fluoroadenosine-3'-phosphate
  modified_base 11: mod_base = OTHER; note = 2'-deoxy-2'-fluoroadenosine-3'-phosphate
  modified_base 12: mod_base = OTHER; note = 2'-O-methyluridine-3'-phosphate
  modified_base 13: mod_base = OTHER; note = 2'-O-methyladenosine-3'-phosphate
  modified_base 14: mod_base = OTHER; note = 2'-O-methyladenosine-3'-phosphate
  modified_base 15: mod_base = OTHER; note = 2'-O-methyladenosine-3'-phosphate
  modified_base 16: mod_base = OTHER; note = 2'-O-methylguanosine-3'-phosphate
  modified_base 17: mod_base = OTHER; note = 2'-O-methyluridine-3'-phosphate
  modified_base 18: mod_base = OTHER; note = 2'-O-methylguanosine-3'-phosphate
  modified_base 19: mod_base = OTHER; note = 2'-O-methyluridine-3'-phosphate
  modified_base 20: mod_base = OTHER; note = 2'-O-methylguanosine-3'-phosphate
  modified_base 21: mod_base = OTHER; note = 2'-O-methyladenosine
gtgattgagaataaagtgtga

SEQ ID NO: 4113 - RNA, 21 nt, synthetic construct
  source 1..21: mol_type = other RNA
  modified_base 1: mod_base = OTHER; note = 2'-O-methyluridine-3'-phosphate
  modified_base 2: mod_base = OTHER; note = 2'-O-methylguanosine-3'-phosphate
  modified_base 3: mod_base = OTHER; note = 2'-O-methyladenosine-3'-phosphate
  modified_base 4: mod_base = OTHER; note = 2'-O-methyluridine-3'-phosphate
  modified_base 5: mod_base = OTHER; note = 2'-O-methyluridine-3'-phosphate
  modified_base 6: mod_base = OTHER; note = 2'-O-methylguanosine-3'-phosphate
  modified_base 7: mod_base = OTHER; note = 2'-deoxy-2'-fluoroadenosine-3'-phosphate
  modified_base 8: mod_base = OTHER; note = 2'-O-methylguanosine-3'-phosphate
  modified_base 9: mod_base = OTHER; note = 2'-deoxy-2'-fluoroadenosine-3'-phosphate
  modified_base 10: mod_base = OTHER; note = 2'-deoxy-2'-fluoroadenosine-3'-phosphate
  modified_base 11: mod_base = OTHER; note = 2'-deoxy-2'-fluorouridine-3'-phosphate
  modified_base 12: mod_base = OTHER; note = 2'-O-methyladenosine-3'-phosphate
  modified_base 13: mod_base = OTHER; note = 2'-O-methyladenosine-3'-phosphate
  modified_base 14: mod_base = OTHER; note = 2'-O-methyladenosine-3'-phosphate
  modified_base 15: mod_base = OTHER; note = 2'-O-methylguanosine-3'-phosphate
  modified_base 16: mod_base = OTHER; note = 2'-O-methyluridine-3'-phosphate
  modified_base 17: mod_base = OTHER; note = 2'-O-methylguanosine-3'-phosphate
  modified_base 18: mod_base = OTHER; note = 2'-O-methyluridine-3'-phosphate
  modified_base 19: mod_base = OTHER; note = 2'-O-methylguanosine-3'-phosphate
  modified_base 20: mod_base = OTHER; note = 2'-O-methylcytidine-3'-phosphate
  modified_base 21: mod_base = OTHER; note = 2'-O-methyladenosine
tgattgagaataaagtgtgca

SEQ ID NO: 4114 - RNA, 21 nt, synthetic construct
  source 1..21: mol_type = other RNA
  modified_base 1: mod_base = OTHER; note = 2'-O-methylguanosine-3'-phosphate
  modified_base 2: mod_base = OTHER; note = 2'-O-methyladenosine-3'-phosphate
  modified_base 3: mod_base = OTHER; note = 2'-O-methyluridine-3'-phosphate
  modified_base 4: mod_base = OTHER; note = 2'-O-methyluridine-3'-phosphate
  modified_base 5: mod_base = OTHER; note = 2'-O-methylguanosine-3'-phosphate
  modified_base 6: mod_base = OTHER; note = 2'-O-methyladenosine-3'-phosphate
  modified_base 7: mod_base = OTHER; note = 2'-deoxy-2'-fluoroguanosine-3'-phosphate
  modified_base 8: mod_base = OTHER; note = 2'-O-methyladenosine-3'-phosphate
  modified_base 9: mod_base = OTHER; note = 2'-deoxy-2'-fluoroadenosine-3'-phosphate
  modified_base 10: mod_base = OTHER; note = 2'-deoxy-2'-fluorouridine-3'-phosphate
  modified_base 11: mod_base = OTHER; note = 2'-deoxy-2'-fluoroadenosine-3'-phosphate
  modified_base 12: mod_base = OTHER; note = 2'-O-methyladenosine-3'-phosphate
  modified_base 13: mod_base = OTHER; note = 2'-O-methyladenosine-3'-phosphate
  modified_base 14: mod_base = OTHER; note = 2'-O-methylguanosine-3'-phosphate
  modified_base 15: mod_base = OTHER; note = 2'-O-methyluridine-3'-phosphate
  modified_base 16: mod_base = OTHER; note = 2'-O-methylguanosine-3'-phosphate
  modified_base 17: mod_base = OTHER; note = 2'-O-methyluridine-3'-phosphate
  modified_base 18: mod_base = OTHER; note = 2'-O-methylguanosine-3'-phosphate
  modified_base 19: mod_base = OTHER; note = 2'-O-methylcytidine-3'-phosphate
  modified_base 20: mod_base = OTHER; note = 2'-O-methyladenosine-3'-phosphate
  modified_base 21: mod_base = OTHER; note = 2'-O-methyladenosine
gattgagaataaagtgtgcaa

SEQ ID NO: 4115 - RNA, 21 nt, synthetic construct
  source 1..21: mol_type = other RNA
  modified_base 1: mod_base = OTHER; note = 2'-O-methyladenosine-3'-phosphate
  modified_base 2: mod_base = OTHER; note = 2'-O-methyluridine-3'-phosphate
  modified_base 3: mod_base = OTHER; note = 2'-O-methyluridine-3'-phosphate
  modified_base 4: mod_base = OTHER; note = 2'-O-methylguanosine-3'-phosphate
  modified_base 5: mod_base = OTHER; note = 2'-O-methyladenosine-3'-phosphate
  modified_base 6: mod_base = OTHER; note = 2'-O-methylguanosine-3'-phosphate
  modified_base 7: mod_base = OTHER; note = 2'-deoxy-2'-fluoroadenosine-3'-phosphate
  modified_base 8: mod_base = OTHER; note = 2'-O-methyladenosine-3'-phosphate
  modified_base 9: mod_base = OTHER; note = 2'-deoxy-2'-fluorouridine-3'-phosphate
  modified_base 10: mod_base = OTHER; note = 2'-deoxy-2'-fluoroadenosine-3'-phosphate
  modified_base 11: mod_base = OTHER; note = 2'-deoxy-2'-fluoroadenosine-3'-phosphate
  modified_base 12: mod_base = OTHER; note = 2'-O-methyladenosine-3'-phosphate
  modified_base 13: mod_base = OTHER; note = 2'-O-methylguanosine-3'-phosphate
  modified_base 14: mod_base = OTHER; note = 2'-O-methyluridine-3'-phosphate
  modified_base 15: mod_base = OTHER; note = 2'-O-methylguanosine-3'-phosphate
  modified_base 16: mod_base = OTHER; note = 2'-O-methyluridine-3'-phosphate
  modified_base 17: mod_base = OTHER; note = 2'-O-methylguanosine-3'-phosphate
  modified_base 18: mod_base = OTHER; note = 2'-O-methylcytidine-3'-phosphate
  modified_base 19: mod_base = OTHER; note = 2'-O-methyladenosine-3'-phosphate
  modified_base 20: mod_base = OTHER; note = 2'-O-methyladenosine-3'-phosphate
  modified_base 21: mod_base = OTHER; note = 2'-O-methyladenosine
attgagaataaagtgtgcaaa

SEQ ID NO: 4116 - RNA, 21 nt, synthetic construct
  source 1..21: mol_type = other RNA
  modified_base 1: mod_base = OTHER; note = 2'-O-methyluridine-3'-phosphate
  modified_base 2: mod_base = OTHER; note = 2'-O-methyluridine-3'-phosphate
  modified_base 3: mod_base = OTHER; note = 2'-O-methylguanosine-3'-phosphate
  modified_base 4: mod_base = OTHER; note = 2'-O-methyladenosine-3'-phosphate
  modified_base 5: mod_base = OTHER; note = 2'-O-methylguanosine-3'-phosphate
  modified_base 6: mod_base = OTHER; note = 2'-O-methyladenosine-3'-phosphate
  modified_base 7: mod_base = OTHER; note = 2'-deoxy-2'-fluoroadenosine-3'-phosphate
  modified_base 8: mod_base = OTHER; note = 2'-O-methyluridine-3'-phosphate
  modified_base 9: mod_base = OTHER; note = 2'-deoxy-2'-fluoroadenosine-3'-phosphate
  modified_base 10: mod_base = OTHER; note = 2'-deoxy-2'-fluoroadenosine-3'-phosphate
  modified_base 11: mod_base = OTHER; note = 2'-deoxy-2'-fluoroadenosine-3'-phosphate
  modified_base 12: mod_base = OTHER; note = 2'-O-methylguanosine-3'-phosphate
  modified_base 13: mod_base = OTHER; note = 2'-O-methyluridine-3'-phosphate
  modified_base 14: mod_base = OTHER; note = 2'-O-methylguanosine-3'-phosphate
  modified_base 15: mod_base = OTHER; note = 2'-O-methyluridine-3'-phosphate
  modified_base 16: mod_base = OTHER; note = 2'-O-methylguanosine-3'-phosphate
  modified_base 17: mod_base = OTHER; note = 2'-O-methylcytidine-3'-phosphate
  modified_base 18: mod_base = OTHER; note = 2'-O-methyladenosine-3'-phosphate
  modified_base 19: mod_base = OTHER; note = 2'-O-methyladenosine-3'-phosphate
  modified_base 20: mod_base = OTHER; note = 2'-O-methyluridine-3'-phosphate
  modified_base 21: mod_base = OTHER; note = 2'-O-methyladenosine
ttgagaataaagtgtgcaata

SEQ ID NO: 4117 - RNA, 21 nt, synthetic construct
  source 1..21: mol_type = other RNA
  modified_base 1: mod_base = OTHER; note = 2'-O-methyluridine-3'-phosphate
  modified_base 2: mod_base = OTHER; note = 2'-O-methylguanosine-3'-phosphate
  modified_base 3: mod_base = OTHER; note = 2'-O-methyladenosine-3'-phosphate
  modified_base 4: mod_base = OTHER; note = 2'-O-methylguanosine-3'-phosphate
  modified_base 5: mod_base = OTHER; note = 2'-O-methyladenosine-3'-phosphate
  modified_base 6: mod_base = OTHER; note = 2'-O-methyladenosine-3'-phosphate
  modified_base 7: mod_base = OTHER; note = 2'-deoxy-2'-fluorouridine-3'-phosphate
  modified_base 8: mod_base = OTHER; note = 2'-O-methyladenosine-3'-phosphate
  modified_base 9: mod_base = OTHER; note = 2'-deoxy-2'-fluoroadenosine-3'-phosphate
  modified_base 10: mod_base = OTHER; note = 2'-deoxy-2'-fluoroadenosine-3'-phosphate
  modified_base 11: mod_base = OTHER; note = 2'-deoxy-2'-fluoroguanosine-3'-phosphate
  modified_base 12: mod_base = OTHER; note = 2'-O-methyluridine-3'-phosphate
  modified_base 13: mod_base = OTHER; note = 2'-O-methylguanosine-3'-phosphate
  modified_base 14: mod_base = OTHER; note = 2'-O-methyluridine-3'-phosphate
  modified_base 15: mod_base = OTHER; note = 2'-O-methylguanosine-3'-phosphate
  modified_base 16: mod_base = OTHER; note = 2'-O-methylcytidine-3'-phosphate
  modified_base 17: mod_base = OTHER; note = 2'-O-methyladenosine-3'-phosphate
  modified_base 18: mod_base = OTHER; note = 2'-O-methyladenosine-3'-phosphate
  modified_base 19: mod_base = OTHER; note = 2'-O-methyluridine-3'-phosphate
  modified_base 20: mod_base = OTHER; note = 2'-O-methylcytidine-3'-phosphate
  modified_base 21: mod_base = OTHER; note = 2'-O-methyladenosine
tgagaataaagtgtgcaatca

SEQ ID NO: 4118 - RNA, 21 nt, synthetic construct
  source 1..21: mol_type = other RNA
  modified_base 1: mod_base = OTHER; note = 2'-O-methylguanosine-3'-phosphate
  modified_base 2: mod_base = OTHER; note = 2'-O-methyladenosine-3'-phosphate
  modified_base 3: mod_base = OTHER; note = 2'-O-methylguanosine-3'-phosphate
  modified_base 4: mod_base = OTHER; note = 2'-O-methyladenosine-3'-phosphate
  modified_base 5: mod_base = OTHER; note = 2'-O-methyladenosine-3'-phosphate
  modified_base 6: mod_base = OTHER; note = 2'-O-methyluridine-3'-phosphate
  modified_base 7: mod_base = OTHER; note = 2'-deoxy-2'-fluoroadenosine-3'-phosphate
  modified_base 8: mod_base = OTHER; note = 2'-O-methyladenosine-3'-phosphate
  modified_base 9: mod_base = OTHER; note = 2'-deoxy-2'-fluoroadenosine-3'-phosphate
  modified_base 10: mod_base = OTHER; note = 2'-deoxy-2'-fluoroguanosine-3'-phosphate
  modified_base 11: mod_base = OTHER; note = 2'-deoxy-2'-fluorouridine-3'-phosphate
  modified_base 12: mod_base = OTHER; note = 2'-O-methylguanosine-3'-phosphate
  modified_base 13: mod_base = OTHER; note = 2'-O-methyluridine-3'-phosphate
  modified_base 14: mod_base = OTHER; note = 2'-O-methylguanosine-3'-phosphate
  modified_base 15: mod_base = OTHER; note = 2'-O-methylcytidine-3'-phosphate
  modified_base 16: mod_base = OTHER; note = 2'-O-methyladenosine-3'-phosphate
  modified_base 17: mod_base = OTHER; note = 2'-O-methyladenosine-3'-phosphate
  modified_base 18: mod_base = OTHER; note = 2'-O-methyluridine-3'-phosphate
  modified_base 19: mod_base = OTHER; note = 2'-O-methylcytidine-3'-phosphate
  modified_base 20: mod_base = OTHER; note = 2'-O-methylguanosine-3'-phosphate
  modified_base 21: mod_base = OTHER; note = 2'-O-methyladenosine
gagaataaagtgtgcaatcga

SEQ ID NO: 4119 - RNA, 21 nt, synthetic construct
  source 1..21: mol_type = other RNA
  modified_base 1: mod_base = OTHER; note = 2'-O-methylguanosine-3'-phosphate
  modified_base 2: mod_base = OTHER; note = 2'-O-methyladenosine-3'-phosphate
  modified_base 3: mod_base = OTHER; note = 2'-O-methyladenosine-3'-phosphate
  modified_base 4: mod_base = OTHER; note = 2'-O-methyluridine-3'-phosphate
  modified_base 5: mod_base = OTHER; note = 2'-O-methyladenosine-3'-phosphate
  modified_base 6: mod_base = OTHER; note = 2'-O-methyladenosine-3'-phosphate
  modified_base 7: mod_base = OTHER; note = 2'-deoxy-2'-fluoroadenosine-3'-phosphate
  modified_base 8: mod_base = OTHER; note = 2'-O-methylguanosine-3'-phosphate
  modified_base 9: mod_base = OTHER; note = 2'-deoxy-2'-fluorouridine-3'-phosphate
  modified_base 10: mod_base = OTHER; note = 2'-deoxy-2'-fluoroguanosine-3'-phosphate
  modified_base 11: mod_base = OTHER; note = 2'-deoxy-2'-fluorouridine-3'-phosphate
  modified_base 12: mod_base = OTHER; note = 2'-O-methylguanosine-3'-phosphate
  modified_base 13: mod_base = OTHER; note = 2'-O-methylcytidine-3'-phosphate
  modified_base 14: mod_base = OTHER; note = 2'-O-methyladenosine-3'-phosphate
  modified_base 15: mod_base = OTHER; note = 2'-O-methyladenosine-3'-phosphate
  modified_base 16: mod_base = OTHER; note = 2'-O-methyluridine-3'-phosphate
  modified_base 17: mod_base = OTHER; note = 2'-O-methylcytidine-3'-phosphate
  modified_base 18: mod_base = OTHER; note = 2'-O-methylguanosine-3'-phosphate
  modified_base 19: mod_base = OTHER; note = 2'-O-methylcytidine-3'-phosphate
  modified_base 20: mod_base = OTHER; note = 2'-O-methyluridine-3'-phosphate
  modified_base 21: mod_base = OTHER; note = 2'-O-methyladenosine
gaataaagtgtgcaatcgcta

SEQ ID NO: 4120 - RNA, 21 nt, synthetic construct
  source 1..21: mol_type = other RNA
  modified_base 1: mod_base = OTHER; note = 2'-O-methyladenosine-3'-phosphate
  modified_base 2: mod_base = OTHER; note = 2'-O-methyladenosine-3'-phosphate
  modified_base 3: mod_base = OTHER; note = 2'-O-methyluridine-3'-phosphate
  modified_base 4: mod_base = OTHER; note = 2'-O-methyladenosine-3'-phosphate
  modified_base 5: mod_base = OTHER; note = 2'-O-methyladenosine-3'-phosphate
  modified_base 6: mod_base = OTHER; note = 2'-O-methyladenosine-3'-phosphate
  modified_base 7: mod_base = OTHER; note = 2'-deoxy-2'-fluoroguanosine-3'-phosphate
  modified_base 8: mod_base = OTHER; note = 2'-O-methyluridine-3'-phosphate
  modified_base 9: mod_base = OTHER; note = 2'-deoxy-2'-fluoroguanosine-3'-phosphate
  modified_base 10: mod_base = OTHER; note = 2'-deoxy-2'-fluorouridine-3'-phosphate
  modified_base 11: mod_base = OTHER; note = 2'-deoxy-2'-fluoroguanosine-3'-phosphate
  modified_base 12: mod_base = OTHER; note = 2'-O-methylcytidine-3'-phosphate
  modified_base 13: mod_base = OTHER; note = 2'-O-methyladenosine-3'-phosphate
  modified_base 14: mod_base = OTHER; note = 2'-O-methyladenosine-3'-phosphate
  modified_base 15: mod_base = OTHER; note = 2'-O-methyluridine-3'-phosphate
  modified_base 16: mod_base = OTHER; note = 2'-O-methylcytidine-3'-phosphate
  modified_base 17: mod_base = OTHER; note = 2'-O-methylguanosine-3'-phosphate
  modified_base 18: mod_base = OTHER; note = 2'-O-methylcytidine-3'-phosphate
  modified_base 19: mod_base = OTHER; note = 2'-O-methyluridine-3'-phosphate
  modified_base 20: mod_base = OTHER; note = 2'-O-methyladenosine-3'-phosphate
  modified_base 21: mod_base = OTHER; note = 2'-O-methyladenosine
aataaagtgtgcaatcgctaa

SEQ ID NO: 4121 - RNA, 21 nt, synthetic construct
  source 1..21: mol_type = other RNA
  modified_base 1: mod_base = OTHER; note = 2'-O-methyladenosine-3'-phosphate
  modified_base 2: mod_base = OTHER; note = 2'-O-methyluridine-3'-phosphate
  modified_base 3: mod_base = OTHER; note = 2'-O-methyladenosine-3'-phosphate
  modified_base 4: mod_base = OTHER; note = 2'-O-methyladenosine-3'-phosphate
  modified_base 5: mod_base = OTHER; note = 2'-O-methyladenosine-3'-phosphate
  modified_base 6: mod_base = OTHER; note = 2'-O-methylguanosine-3'-phosphate
  modified_base 7: mod_base = OTHER; note = 2'-deoxy-2'-fluorouridine-3'-phosphate
  modified_base 8: mod_base = OTHER; note = 2'-O-methylguanosine-3'-phosphate
  modified_base 9: mod_base = OTHER; note = 2'-deoxy-2'-fluorouridine-3'-phosphate
  modified_base 10: mod_base = OTHER; note = 2'-deoxy-2'-fluoroguanosine-3'-phosphate
  modified_base 11: mod_base = OTHER; note = 2'-deoxy-2'-fluorocytidine-3'-phosphate
  modified_base 12: mod_base = OTHER; note = 2'-O-methyladenosine-3'-phosphate
  modified_base 13: mod_base = OTHER; note = 2'-O-methyladenosine-3'-phosphate
  modified_base 14: mod_base = OTHER; note = 2'-O-methyluridine-3'-phosphate
  modified_base 15: mod_base = OTHER; note = 2'-O-methylcytidine-3'-phosphate
  modified_base 16: mod_base = OTHER; note = 2'-O-methylguanosine-3'-phosphate
  modified_base 17: mod_base = OTHER; note = 2'-O-methylcytidine-3'-phosphate
  modified_base 18: mod_base = OTHER; note = 2'-O-methyluridine-3'-phosphate
  modified_base 19: mod_base = OTHER; note = 2'-O-methyladenosine-3'-phosphate
  modified_base 20: mod_base = OTHER; note = 2'-O-methyluridine-3'-phosphate
  modified_base 21: mod_base = OTHER; note = 2'-O-methyladenosine
ataaagtgtgcaatcgctata

SEQ ID NO: 4122 - RNA, 21 nt, synthetic construct
  source 1..21: mol_type = other RNA
  modified_base 1: mod_base = OTHER; note = 2'-O-methyluridine-3'-phosphate
  modified_base 2: mod_base = OTHER; note = 2'-O-methyladenosine-3'-phosphate
  modified_base 3: mod_base = OTHER; note = 2'-O-methyladenosine-3'-phosphate
  modified_base 4: mod_base = OTHER; note = 2'-O-methyladenosine-3'-phosphate
  modified_base 5: mod_base = OTHER; note = 2'-O-methylguanosine-3'-phosphate
  modified_base 6: mod_base = OTHER; note = 2'-O-methyluridine-3'-phosphate
  modified_base 7: mod_base = OTHER; note = 2'-deoxy-2'-fluoroguanosine-3'-phosphate
  modified_base 8: mod_base = OTHER; note = 2'-O-methyluridine-3'-phosphate
  modified_base 9: mod_base = OTHER; note = 2'-deoxy-2'-fluoroguanosine-3'-phosphate
  modified_base 10: mod_base = OTHER; note = 2'-deoxy-2'-fluorocytidine-3'-phosphate
  modified_base 11: mod_base = OTHER; note = 2'-deoxy-2'-fluoroadenosine-3'-phosphate
  modified_base 12: mod_base = OTHER; note = 2'-O-methyladenosine-3'-phosphate
  modified_base 13: mod_base = OTHER; note = 2'-O-methyluridine-3'-phosphate
  modified_base 14: mod_base = OTHER; note = 2'-O-methylcytidine-3'-phosphate
  modified_base 15: mod_base = OTHER; note = 2'-O-methylguanosine-3'-phosphate
  modified_base 16: mod_base = OTHER; note = 2'-O-methylcytidine-3'-phosphate
  modified_base 17: mod_base = OTHER; note = 2'-O-methyluridine-3'-phosphate
  modified_base 18: mod_base = OTHER; note = 2'-O-methyladenosine-3'-phosphate
  modified_base 19: mod_base = OTHER; note = 2'-O-methyluridine-3'-phosphate
  modified_base 20: mod_base = OTHER; note = 2'-O-methylguanosine-3'-phosphate
  modified_base 21: mod_base = OTHER; note = 2'-O-methyladenosine
taaagtgtgcaatcgctatga

SEQ ID NO: 4123 - RNA, 21 nt, synthetic construct
  source 1..21: mol_type = other RNA
  modified_base 1: mod_base = OTHER; note = 2'-O-methyladenosine-3'-phosphate
  modified_base 2: mod_base = OTHER; note = 2'-O-methyladenosine-3'-phosphate
  modified_base 3: mod_base = OTHER; note = 2'-O-methyladenosine-3'-phosphate
  modified_base 4: mod_base = OTHER; note = 2'-O-methylguanosine-3'-phosphate
  modified_base 5: mod_base = OTHER; note = 2'-O-methyluridine-3'-phosphate
  modified_base 6: mod_base = OTHER; note = 2'-O-methylguanosine-3'-phosphate
  modified_base 7: mod_base = OTHER; note = 2'-deoxy-2'-fluorouridine-3'-phosphate
  modified_base 8: mod_base = OTHER; note = 2'-O-methylguanosine-3'-phosphate
  modified_base 9: mod_base = OTHER; note = 2'-deoxy-2'-fluorocytidine-3'-phosphate
  modified_base 10: mod_base = OTHER; note = 2'-deoxy-2'-fluoroadenosine-3'-phosphate
  modified_base 11: mod_base = OTHER; note = 2'-deoxy-2'-fluoroadenosine-3'-phosphate
  modified_base 12: mod_base = OTHER; note = 2'-O-methyluridine-3'-phosphate
  modified_base 13: mod_base = OTHER; note = 2'-O-methylcytidine-3'-phosphate
  modified_base 14: mod_base = OTHER; note = 2'-O-methylguanosine-3'-phosphate
  modified_base 15: mod_base = OTHER; note = 2'-O-methylcytidine-3'-phosphate
  modified_base 16: mod_base = OTHER; note = 2'-O-methyluridine-3'-phosphate
  modified_base 17: mod_base = OTHER; note = 2'-O-methyladenosine-3'-phosphate
  modified_base 18: mod_base = OTHER; note = 2'-O-methyluridine-3'-phosphate
  modified_base 19: mod_base = OTHER; note = 2'-O-methylguanosine-3'-phosphate
  modified_base 20: mod_base = OTHER; note = 2'-O-methyladenosine-3'-phosphate
  modified_base 21: mod_base = OTHER; note = 2'-O-methyladenosine
aaagtgtgcaatcgctatgaa

SEQ ID NO: 4124 - RNA, 21 nt, synthetic construct
  source 1..21: mol_type = other RNA
  modified_base 1: mod_base = OTHER; note = 2'-O-methyladenosine-3'-phosphate
  modified_base 2: mod_base = OTHER; note = 2'-O-methyladenosine-3'-phosphate
  modified_base 3: mod_base = OTHER; note = 2'-O-methylguanosine-3'-phosphate
  modified_base 4: mod_base = OTHER; note = 2'-O-methyluridine-3'-phosphate
  modified_base 5: mod_base = OTHER; note = 2'-O-methylguanosine-3'-phosphate
  modified_base 6: mod_base = OTHER; note = 2'-O-methyluridine-3'-phosphate
  modified_base 7: mod_base = OTHER; note = 2'-deoxy-2'-fluoroguanosine-3'-phosphate
  modified_base 8: mod_base = OTHER; note = 2'-O-methylcytidine-3'-phosphate
  modified_base 9: mod_base = OTHER; note = 2'-deoxy-2'-fluoroadenosine-3'-phosphate
  modified_base 10: mod_base = OTHER; note = 2'-deoxy-2'-fluoroadenosine-3'-phosphate
  modified_base 11: mod_base = OTHER; note = 2'-deoxy-2'-fluorouridine-3'-phosphate
  modified_base 12: mod_base = OTHER; note = 2'-O-methylcytidine-3'-phosphate
  modified_base 13: mod_base = OTHER; note = 2'-O-methylguanosine-3'-phosphate
  modified_base 14: mod_base = OTHER; note = 2'-O-methylcytidine-3'-phosphate
  modified_base 15: mod_base = OTHER; note = 2'-O-methyluridine-3'-phosphate
  modified_base 16: mod_base = OTHER; note = 2'-O-methyladenosine-3'-phosphate
  modified_base 17: mod_base = OTHER; note = 2'-O-methyluridine-3'-phosphate
  modified_base 18: mod_base = OTHER; note = 2'-O-methylguanosine-3'-phosphate
  modified_base 19: mod_base = OTHER; note = 2'-O-methyladenosine-3'-phosphate
  modified_base 20: mod_base = OTHER; note = 2'-O-methylguanosine-3'-phosphate
  modified_base 21: mod_base = OTHER; note = 2'-O-methyladenosine
aagtgtgcaatcgctatgaga

SEQ ID NO: 4125 - RNA, 21 nt, synthetic construct
  source 1..21: mol_type = other RNA
  modified_base 1: mod_base = OTHER; note = 2'-O-methyladenosine-3'-phosphate
  modified_base 2: mod_base = OTHER; note = 2'-O-methylguanosine-3'-phosphate
  modified_base 3: mod_base = OTHER; note = 2'-O-methyluridine-3'-phosphate
  modified_base 4: mod_base = OTHER; note = 2'-O-methylguanosine-3'-phosphate
  modified_base 5: mod_base = OTHER; note = 2'-O-methyluridine-3'-phosphate
  modified_base 6: mod_base = OTHER; note = 2'-O-methylguanosine-3'-phosphate
  modified_base 7: mod_base = OTHER; note = 2'-deoxy-2'-fluorocytidine-3'-phosphate
  modified_base 8: mod_base = OTHER; note = 2'-O-methyladenosine-3'-phosphate
  modified_base 9: mod_base = OTHER; note = 2'-deoxy-2'-fluoroadenosine-3'-phosphate
  modified_base 10: mod_base = OTHER; note = 2'-deoxy-2'-fluorouridine-3'-phosphate
  modified_base 11: mod_base = OTHER; note = 2'-deoxy-2'-fluorocytidine-3'-phosphate
  modified_base 12: mod_base = OTHER; note = 2'-O-methylguanosine-3'-phosphate
  modified_base 13: mod_base = OTHER; note = 2'-O-methylcytidine-3'-phosphate
  modified_base 14: mod_base = OTHER; note = 2'-O-methyluridine-3'-phosphate
  modified_base 15: mod_base = OTHER; note = 2'-O-methyladenosine-3'-phosphate
  modified_base 16: mod_base = OTHER; note = 2'-O-methyluridine-3'-phosphate
  modified_base 17: mod_base = OTHER; note = 2'-O-methylguanosine-3'-phosphate
  modified_base 18: mod_base = OTHER; note = 2'-O-methyladenosine-3'-phosphate
  modified_base 19: mod_base = OTHER; note = 2'-O-methylguanosine-3'-phosphate
  modified_base 20: mod_base = OTHER; note = 2'-O-methyluridine-3'-phosphate
  modified_base 21: mod_base = OTHER; note = 2'-O-methyladenosine
agtgtgcaatcgctatgagta

SEQ ID NO: 4126 - RNA, 21 nt, synthetic construct
  source 1..21: mol_type = other RNA
  modified_base 1: mod_base = OTHER; note = 2'-O-methylguanosine-3'-phosphate
  modified_base 2: mod_base = OTHER; note = 2'-O-methyluridine-3'-phosphate
  modified_base 3: mod_base = OTHER; note = 2'-O-methylguanosine-3'-phosphate
  modified_base 4: mod_base = OTHER; note = 2'-O-methyluridine-3'-phosphate
  modified_base 5: mod_base = OTHER; note = 2'-O-methylguanosine-3'-phosphate
  modified_base 6: mod_base = OTHER; note = 2'-O-methylcytidine-3'-phosphate
  modified_base 7: mod_base = OTHER; note = 2'-deoxy-2'-fluoroadenosine-3'-phosphate
  modified_base 8: mod_base = OTHER; note = 2'-O-methyladenosine-3'-phosphate
  modified_base 9: mod_base = OTHER; note = 2'-deoxy-2'-fluorouridine-3'-phosphate
  modified_base 10: mod_base = OTHER; note = 2'-deoxy-2'-fluorocytidine-3'-phosphate
  modified_base 11: mod_base = OTHER; note = 2'-deoxy-2'-fluoroguanosine-3'-phosphate
  modified_base 12: mod_base = OTHER; note = 2'-O-methylcytidine-3'-phosphate
  modified_base 13: mod_base = OTHER; note = 2'-O-methyluridine-3'-phosphate
  modified_base 14: mod_base = OTHER; note = 2'-O-methyladenosine-3'-phosphate
  modified_base 15: mod_base = OTHER; note = 2'-O-methyluridine-3'-phosphate
  modified_base 16: mod_base = OTHER; note = 2'-O-methylguanosine-3'-phosphate
  modified_base 17: mod_base = OTHER; note = 2'-O-methyladenosine-3'-phosphate
  modified_base 18: mod_base = OTHER; note = 2'-O-methylguanosine-3'-phosphate
  modified_base 19: mod_base = OTHER; note = 2'-O-methyluridine-3'-phosphate
  modified_base 20: mod_base = OTHER; note = 2'-O-methyluridine-3'-phosphate
  modified_base 21: mod_base = OTHER; note = 2'-O-methyladenosine
gtgtgcaatcgctatgagtta

SEQ ID NO: 4127 - RNA, 21 nt, synthetic construct
  source 1..21: mol_type = other RNA
  modified_base 1: mod_base = OTHER; note = 2'-O-methyluridine-3'-phosphate
  modified_base 2: mod_base = OTHER; note = 2'-O-methylguanosine-3'-phosphate
  modified_base 3: mod_base = OTHER; note = 2'-O-methyluridine-3'-phosphate
  modified_base 4: mod_base = OTHER; note = 2'-O-methylguanosine-3'-phosphate
  modified_base 5: mod_base = OTHER; note = 2'-O-methylcytidine-3'-phosphate
  modified_base 6: mod_base = OTHER; note = 2'-O-methyladenosine-3'-phosphate
  modified_base 7: mod_base = OTHER; note = 2'-deoxy-2'-fluoroadenosine-3'-phosphate
  modified_base 8: mod_base = OTHER; note = 2'-O-methyluridine-3'-phosphate
  modified_base 9: mod_base = OTHER; note = 2'-deoxy-2'-fluorocytidine-3'-phosphate
  modified_base 10: mod_base = OTHER; note = 2'-deoxy-2'-fluoroguanosine-3'-phosphate
  modified_base 11: mod_base = OTHER; note = 2'-deoxy-2'-fluorocytidine-3'-phosphate
  modified_base 12: mod_base = OTHER; note = 2'-O-methyluridine-3'-phosphate
  modified_base 13: mod_base = OTHER; note = 2'-O-methyladenosine-3'-phosphate
  modified_base 14: mod_base = OTHER; note = 2'-O-methyluridine-3'-phosphate
  modified_base 15: mod_base = OTHER; note = 2'-O-methylguanosine-3'-phosphate
  modified_base 16: mod_base = OTHER; note = 2'-O-methyladenosine-3'-phosphate
  modified_base 17: mod_base = OTHER; note = 2'-O-methylguanosine-3'-phosphate
  modified_base 18: mod_base = OTHER; note = 2'-O-methyluridine-3'-phosphate
  modified_base 19: mod_base = OTHER; note = 2'-O-methyluridine-3'-phosphate
  modified_base 20: mod_base = OTHER; note = 2'-O-methyluridine-3'-phosphate
  modified_base 21: mod_base = OTHER; note = 2'-O-methyladenosine
tgtgcaatcgctatgagttta

SEQ ID NO: 4128 - RNA, 21 nt, synthetic construct
  source 1..21: mol_type = other RNA
  modified_base 1: mod_base = OTHER; note = 2'-O-methylguanosine-3'-phosphate
  modified_base 2: mod_base = OTHER; note = 2'-O-methyluridine-3'-phosphate
  modified_base 3: mod_base = OTHER; note = 2'-O-methylguanosine-3'-phosphate
  modified_base 4: mod_base = OTHER; note = 2'-O-methylcytidine-3'-phosphate
  modified_base 5: mod_base = OTHER; note = 2'-O-methyladenosine-3'-phosphate
  modified_base 6: mod_base = OTHER; note = 2'-O-methyladenosine-3'-phosphate
  modified_base 7: mod_base = OTHER; note = 2'-deoxy-2'-fluorouridine-3'-phosphate
  modified_base 8: mod_base = OTHER; note = 2'-O-methylcytidine-3'-phosphate
  modified_base 9: mod_base = OTHER; note = 2'-deoxy-2'-fluoroguanosine-3'-phosphate
  modified_base 10: mod_base = OTHER; note = 2'-deoxy-2'-fluorocytidine-3'-phosphate
  modified_base 11: mod_base = OTHER; note = 2'-deoxy-2'-fluorouridine-3'-phosphate
  modified_base 12: mod_base = OTHER; note = 2'-O-methyladenosine-3'-phosphate
  modified_base 13: mod_base = OTHER; note = 2'-O-methyluridine-3'-phosphate
  modified_base 14: mod_base = OTHER; note = 2'-O-methylguanosine-3'-phosphate
  modified_base 15: mod_base = OTHER; note = 2'-O-methyladenosine-3'-phosphate
  modified_base 16: mod_base = OTHER; note = 2'-O-methylguanosine-3'-phosphate
  modified_base 17: mod_base = OTHER; note = 2'-O-methyluridine-3'-phosphate
  modified_base 18: mod_base = OTHER; note = 2'-O-methyluridine-3'-phosphate
  modified_base 19: mod_base = OTHER; note = 2'-O-methyluridine-3'-phosphate
  modified_base 20: mod_base = OTHER; note = 2'-O-methylcytidine-3'-phosphate
  modified_base 21: mod_base = OTHER; note = 2'-O-methyladenosine
gtgcaatcgctatgagtttca

SEQ ID NO: 4129 - RNA, 21 nt, synthetic construct
  source 1..21: mol_type = other RNA
  modified_base 1: mod_base = OTHER; note = 2'-O-methyluridine-3'-phosphate
  modified_base 2: mod_base = OTHER; note = 2'-O-methylguanosine-3'-phosphate
  modified_base 3: mod_base = OTHER; note = 2'-O-methylcytidine-3'-phosphate
  modified_base 4: mod_base = OTHER; note = 2'-O-methyladenosine-3'-phosphate
  modified_base 5: mod_base = OTHER; note = 2'-O-methyladenosine-3'-phosphate
  modified_base 6: mod_base = OTHER; note = 2'-O-methyluridine-3'-phosphate
  modified_base 7: mod_base = OTHER; note = 2'-deoxy-2'-fluorocytidine-3'-phosphate
  modified_base 8: mod_base = OTHER; note = 2'-O-methylguanosine-3'-phosphate
  modified_base 9: mod_base = OTHER; note = 2'-deoxy-2'-fluorocytidine-3'-phosphate
  modified_base 10: mod_base = OTHER; note = 2'-deoxy-2'-fluorouridine-3'-phosphate
  modified_base 11: mod_base = OTHER; note = 2'-deoxy-2'-fluoroadenosine-3'-phosphate
  modified_base 12: mod_base = OTHER; note = 2'-O-methyluridine-3'-phosphate
  modified_base 13: mod_base = OTHER; note = 2'-O-methylguanosine-3'-phosphate
  modified_base 14: mod_base = OTHER; note = 2'-O-methyladenosine-3'-phosphate
  modified_base 15: mod_base = OTHER; note = 2'-O-methylguanosine-3'-phosphate
  modified_base 16: mod_base = OTHER; note = 2'-O-methyluridine-3'-phosphate
  modified_base 17: mod_base = OTHER; note = 2'-O-methyluridine-3'-phosphate
  modified_base 18: mod_base = OTHER; note = 2'-O-methyluridine-3'-phosphate
  modified_base 19: mod_base = OTHER; note = 2'-O-methylcytidine-3'-phosphate
  modified_base 20: mod_base = OTHER; note = 2'-O-methyluridine-3'-phosphate
  modified_base 21: mod_base = OTHER; note = 2'-O-methyladenosine
tgcaatcgctatgagtttcta

SEQ ID NO: 4130 - RNA, 21 nt, synthetic construct
  source 1..21: mol_type = other RNA
  modified_base 1: mod_base = OTHER; note = 2'-O-methylcytidine-3'-phosphate
  modified_base 2: mod_base = OTHER; note = 2'-O-methyladenosine-3'-phosphate
  modified_base 3: mod_base = OTHER; note = 2'-O-methyladenosine-3'-phosphate
  modified_base 4: mod_base = OTHER; note = 2'-O-methyluridine-3'-phosphate
  modified_base 5: mod_base = OTHER; note = 2'-O-methylcytidine-3'-phosphate
  modified_base 6: mod_base = OTHER; note = 2'-O-methylguanosine-3'-phosphate
  modified_base 7: mod_base = OTHER; note = 2'-deoxy-2'-fluorocytidine-3'-phosphate
  modified_base 8: mod_base = OTHER; note = 2'-O-methyluridine-3'-phosphate
  modified_base 9: mod_base = OTHER; note = 2'-deoxy-2'-fluoroadenosine-3'-phosphate
  modified_base 10: mod_base = OTHER; note = 2'-deoxy-2'-fluorouridine-3'-phosphate
  modified_base 11: mod_base = OTHER; note = 2'-deoxy-2'-fluoroguanosine-3'-phosphate
  modified_base 12: mod_base = OTHER; note = 2'-O-methyladenosine-3'-phosphate
  modified_base 13: mod_base = OTHER; note = 2'-O-methylguanosine-3'-phosphate
  modified_base 14: mod_base = OTHER; note = 2'-O-methyluridine-3'-phosphate
  modified_base 15: mod_base = OTHER; note = 2'-O-methyluridine-3'-phosphate
  modified_base 16: mod_base = OTHER; note = 2'-O-methyluridine-3'-phosphate
  modified_base 17: mod_base = OTHER; note = 2'-O-methylcytidine-3'-phosphate
  modified_base 18: mod_base = OTHER; note = 2'-O-methyluridine-3'-phosphate
  modified_base 19: mod_base = OTHER; note = 2'-O-methylguanosine-3'-phosphate
  modified_base 20: mod_base = OTHER; note = 2'-O-methyladenosine-3'-phosphate
  modified_base 21: mod_base = OTHER; note = 2'-O-methyladenosine
caatcgctatgagtttctgaa

SEQ ID NO: 4131 - RNA, 21 nt, synthetic construct
  source 1..21: mol_type = other RNA
  modified_base 1: mod_base = OTHER; note = 2'-O-methyladenosine-3'-phosphate
  modified_base 2: mod_base = OTHER; note = 2'-O-methyladenosine-3'-phosphate
  modified_base 3: mod_base = OTHER; note = 2'-O-methyluridine-3'-phosphate
  modified_base 4: mod_base = OTHER; note = 2'-O-methylcytidine-3'-phosphate
  modified_base 5: mod_base = OTHER; note = 2'-O-methylguanosine-3'-phosphate
  modified_base 6: mod_base = OTHER; note = 2'-O-methylcytidine-3'-phosphate
  modified_base 7: mod_base = OTHER; note = 2'-deoxy-2'-fluorouridine-3'-phosphate
  modified_base 8: mod_base = OTHER; note = 2'-O-methyladenosine-3'-phosphate
  modified_base 9: mod_base = OTHER; note = 2'-deoxy-2'-fluorouridine-3'-phosphate
  modified_base 10: mod_base = OTHER; note = 2'-deoxy-2'-fluoroguanosine-3'-phosphate
  modified_base 11: mod_base = OTHER; note = 2'-deoxy-2'-fluoroadenosine-3'-phosphate
  modified_base 12: mod_base = OTHER; note = 2'-O-methylguanosine-3'-phosphate
  modified_base 13: mod_base = OTHER; note = 2'-O-methyluridine-3'-phosphate
  modified_base 14: mod_base = OTHER; note = 2'-O-methyluridine-3'-phosphate
  modified_base 15: mod_base = OTHER; note = 2'-O-methyluridine-3'-phosphate
  modified_base 16: mod_base = OTHER; note = 2'-O-methylcytidine-3'-phosphate
  modified_base 17: mod_base = OTHER; note = 2'-O-methyluridine-3'-phosphate
  modified_base 18: mod_base = OTHER; note = 2'-O-methylguanosine-3'-phosphate
  modified_base 19: mod_base = OTHER; note = 2'-O-methyladenosine-3'-phosphate
  modified_base 20: mod_base = OTHER; note = 2'-O-methyladenosine-3'-phosphate
  modified_base 21: mod_base = OTHER; note = 2'-O-methyladenosine
aatcgctatgagtttctgaaa

SEQ ID NO: 4132 - RNA, 21 nt, synthetic construct
  source 1..21: mol_type = other RNA
  modified_base 1: mod_base = OTHER; note = 2'-O-methyladenosine-3'-phosphate
  modified_base 2: mod_base = OTHER; note = 2'-O-methyluridine-3'-phosphate
  modified_base 3: mod_base = OTHER; note = 2'-O-methylcytidine-3'-phosphate
  modified_base 4: mod_base = OTHER; note = 2'-O-methylguanosine-3'-phosphate
  modified_base 5: mod_base = OTHER; note = 2'-O-methylcytidine-3'-phosphate
  modified_base 6: mod_base = OTHER; note = 2'-O-methyluridine-3'-phosphate
  modified_base 7: mod_base = OTHER; note = 2'-deoxy-2'-fluoroadenosine-3'-phosphate
  modified_base 8: mod_base = OTHER; note = 2'-O-methyluridine-3'-phosphate
  modified_base 9: mod_base = OTHER; note = 2'-deoxy-2'-fluoroguanosine-3'-phosphate
  modified_base 10: mod_base = OTHER; note = 2'-deoxy-2'-fluoroadenosine-3'-phosphate
  modified_base 11: mod_base = OTHER; note = 2'-deoxy-2'-fluoroguanosine-3'-phosphate
  modified_base 12: mod_base = OTHER; note = 2'-O-methyluridine-3'-phosphate
  modified_base 13: mod_base = OTHER; note = 2'-O-methyluridine-3'-phosphate
  modified_base 14: mod_base = OTHER; note = 2'-O-methyluridine-3'-phosphate
  modified_base 15: mod_base = OTHER; note = 2'-O-methylcytidine-3'-phosphate
  modified_base 16: mod_base = OTHER; note = 2'-O-methyluridine-3'-phosphate
  modified_base 17: mod_base = OTHER; note = 2'-O-methylguanosine-3'-phosphate
  modified_base 18: mod_base = OTHER; note = 2'-O-methyladenosine-3'-phosphate
  modified_base 19: mod_base = OTHER; note = 2'-O-methyladenosine-3'-phosphate
  modified_base 20: mod_base = OTHER; note = 2'-O-methyluridine-3'-phosphate
  modified_base 21: mod_base = OTHER; note = 2'-O-methyladenosine
atcgctatgagtttctgaata

SEQ ID NO: 4133 - RNA, 21 nt, synthetic construct
  source 1..21: mol_type = other RNA
  modified_base 1: mod_base = OTHER; note = 2'-O-methyluridine-3'-phosphate
  modified_base 2: mod_base = OTHER; note = 2'-O-methylcytidine-3'-phosphate
  modified_base 3: mod_base = OTHER; note = 2'-O-methylguanosine-3'-phosphate
  modified_base 4: mod_base = OTHER; note = 2'-O-methylcytidine-3'-phosphate
  modified_base 5: mod_base = OTHER; note = 2'-O-methyluridine-3'-phosphate
  modified_base 6: mod_base = OTHER; note = 2'-O-methyladenosine-3'-phosphate
  modified_base 7: mod_base = OTHER; note = 2'-deoxy-2'-fluorouridine-3'-phosphate
  modified_base 8: mod_base = OTHER; note = 2'-O-methylguanosine-3'-phosphate
  modified_base 9: mod_base = OTHER; note = 2'-deoxy-2'-fluoroadenosine-3'-phosphate
  modified_base 10: mod_base = OTHER; note = 2'-deoxy-2'-fluoroguanosine-3'-phosphate
  modified_base 11: mod_base = OTHER; note = 2'-deoxy-2'-fluorouridine-3'-phosphate
  modified_base 12: mod_base = OTHER; note = 2'-O-methyluridine-3'-phosphate
  modified_base 13: mod_base = OTHER; note = 2'-O-methyluridine-3'-phosphate
  modified_base 14: mod_base = OTHER; note = 2'-O-methylcytidine-3'-phosphate
  modified_base 15: mod_base = OTHER; note = 2'-O-methyluridine-3'-phosphate
  modified_base 16: mod_base = OTHER; note = 2'-O-methylguanosine-3'-phosphate
  modified_base 17: mod_base = OTHER; note = 2'-O-methyladenosine-3'-phosphate
  modified_base 18: mod_base = OTHER; note = 2'-O-methyladenosine-3'-phosphate
  modified_base 19: mod_base = OTHER; note = 2'-O-methyluridine-3'-phosphate
  modified_base 20: mod_base = OTHER; note = 2'-O-methylguanosine-3'-phosphate
  modified_base 21: mod_base = OTHER; note = 2'-O-methyladenosine
tcgctatgagtttctgaatga

SEQ ID NO: 4134 - RNA, 21 nt, synthetic construct
  source 1..21: mol_type = other RNA
  modified_base 1: mod_base = OTHER; note = 2'-O-methylcytidine-3'-phosphate
  modified_base 2: mod_base = OTHER; note = 2'-O-methylguanosine-3'-phosphate
  modified_base 3: mod_base = OTHER; note = 2'-O-methylcytidine-3'-phosphate
  modified_base 4: mod_base = OTHER; note = 2'-O-methyluridine-3'-phosphate
  modified_base 5: mod_base = OTHER; note = 2'-O-methyladenosine-3'-phosphate
  modified_base 6: mod_base = OTHER; note = 2'-O-methyluridine-3'-phosphate
  modified_base 7: mod_base = OTHER; note = 2'-deoxy-2'-fluoroguanosine-3'-phosphate
  modified_base 8: mod_base = OTHER; note = 2'-O-methyladenosine-3'-phosphate
  modified_base 9: mod_base = OTHER; note = 2'-deoxy-2'-fluoroguanosine-3'-phosphate
  modified_base 10: mod_base = OTHER; note = 2'-deoxy-2'-fluorouridine-3'-phosphate
  modified_base 11: mod_base = OTHER; note = 2'-deoxy-2'-fluorouridine-3'-phosphate
  modified_base 12: mod_base = OTHER; note = 2'-O-methyluridine-3'-phosphate
  modified_base 13: mod_base = OTHER; note = 2'-O-methylcytidine-3'-phosphate
  modified_base 14: mod_base = OTHER; note = 2'-O-methyluridine-3'-phosphate
  modified_base 15: mod_base = OTHER; note = 2'-O-methylguanosine-3'-phosphate
  modified_base 16: mod_base = OTHER; note = 2'-O-methyladenosine-3'-phosphate
  modified_base 17: mod_base = OTHER; note = 2'-O-methyladenosine-3'-phosphate
  modified_base 18: mod_base = OTHER; note = 2'-O-methyluridine-3'-phosphate
  modified_base 19: mod_base = OTHER; note = 2'-O-methylguanosine-3'-phosphate
  modified_base 20: mod_base = OTHER; note = 2'-O-methylguanosine-3'-phosphate
  modified_base 21: mod_base = OTHER; note = 2'-O-methyladenosine
cgctatgagtttctgaatgga

SEQ ID NO: 4135 - RNA, 21 nt, synthetic construct
  source 1..21: mol_type = other RNA
  modified_base 1: mod_base = OTHER; note = 2'-O-methylguanosine-3'-phosphate
  modified_base 2: mod_base = OTHER; note = 2'-O-methylcytidine-3'-phosphate
  modified_base 3: mod_base = OTHER; note = 2'-O-methyluridine-3'-phosphate
  modified_base 4: mod_base = OTHER; note = 2'-O-methyladenosine-3'-phosphate
  modified_base 5: mod_base = OTHER; note = 2'-O-methyluridine-3'-phosphate
  modified_base 6: mod_base = OTHER; note = 2'-O-methylguanosine-3'-phosphate
  modified_base 7: mod_base = OTHER; note = 2'-deoxy-2'-fluoroadenosine-3'-phosphate
  modified_base 8: mod_base = OTHER; note = 2'-O-methylguanosine-3'-phosphate
  modified_base 9: mod_base = OTHER; note = 2'-deoxy-2'-fluorouridine-3'-phosphate
  modified_base 10: mod_base = OTHER; note = 2'-deoxy-2'-fluorouridine-3'-phosphate
  modified_base 11: mod_base = OTHER; note = 2'-deoxy-2'-fluorouridine-3'-phosphate
  modified_base 12: mod_base = OTHER; note = 2'-O-methylcytidine-3'-phosphate
  modified_base 13: mod_base = OTHER; note = 2'-O-methyluridine-3'-phosphate
  modified_base 14: mod_base = OTHER; note = 2'-O-methylguanosine-3'-phosphate
  modified_base 15: mod_base = OTHER; note = 2'-O-methyladenosine-3'-phosphate
  modified_base 16: mod_base = OTHER; note = 2'-O-methyladenosine-3'-phosphate
  modified_base 17: mod_base = OTHER; note = 2'-O-methyluridine-3'-phosphate
  modified_base 18: mod_base = OTHER; note = 2'-O-methylguanosine-3'-phosphate
  modified_base 19: mod_base = OTHER; note = 2'-O-methylguanosine-3'-phosphate
  modified_base 20: mod_base = OTHER; note = 2'-O-methyladenosine-3'-phosphate
  modified_base 21: mod_base = OTHER; note = 2'-O-methyladenosine
gctatgagtttctgaatggaa

SEQ ID NO: 4136 - RNA, 21 nt, synthetic construct
  source 1..21: mol_type = other RNA
  modified_base 1: mod_base = OTHER; note = 2'-O-methylcytidine-3'-phosphate
  modified_base 2: mod_base = OTHER; note = 2'-O-methyluridine-3'-phosphate
  modified_base 3: mod_base = OTHER; note = 2'-O-methyladenosine-3'-phosphate
  modified_base 4: mod_base = OTHER; note = 2'-O-methyluridine-3'-phosphate
  modified_base 5: mod_base = OTHER; note = 2'-O-methylguanosine-3'-phosphate
  modified_base 6: mod_base = OTHER; note = 2'-O-methyladenosine-3'-phosphate
  modified_base 7: mod_base = OTHER; note = 2'-deoxy-2'-fluoroguanosine-3'-phosphate
  modified_base 8: mod_base = OTHER; note = 2'-O-methyluridine-3'-phosphate
  modified_base 9: mod_base = OTHER; note = 2'-deoxy-2'-fluorouridine-3'-phosphate
  modified_base 10: mod_base = OTHER; note = 2'-deoxy-2'-fluorouridine-3'-phosphate
  modified_base 11: mod_base = OTHER; note = 2'-deoxy-2'-fluorocytidine-3'-phosphate
  modified_base 12: mod_base = OTHER; note = 2'-O-methyluridine-3'-phosphate
  modified_base 13: mod_base = OTHER; note = 2'-O-methylguanosine-3'-phosphate
  modified_base 14: mod_base = OTHER; note = 2'-O-methyladenosine-3'-phosphate
  modified_base 15: mod_base = OTHER; note = 2'-O-methyladenosine-3'-phosphate
  modified_base 16: mod_base = OTHER; note = 2'-O-methyluridine-3'-phosphate
  modified_base 17: mod_base = OTHER; note = 2'-O-methylguanosine-3'-phosphate
  modified_base 18: mod_base = OTHER; note = 2'-O-methylguanosine-3'-phosphate
  modified_base 19: mod_base = OTHER; note = 2'-O-methyladenosine-3'-phosphate
  modified_base 20: mod_base = OTHER; note = 2'-O-methyladenosine-3'-phosphate
  modified_base 21: mod_base = OTHER; note = 2'-O-methyladenosine
ctatgagtttctgaatggaaa

SEQ ID NO: 4137 - RNA, 21 nt, synthetic construct
  source 1..21: mol_type = other RNA
  modified_base 1: mod_base = OTHER; note = 2'-O-methyluridine-3'-phosphate
  modified_base 2: mod_base = OTHER; note = 2'-O-methyladenosine-3'-phosphate
  modified_base 3: mod_base = OTHER; note = 2'-O-methyluridine-3'-phosphate
  modified_base 4: mod_base = OTHER; note = 2'-O-methylguanosine-3'-phosphate
  modified_base 5: mod_base = OTHER; note = 2'-O-methyladenosine-3'-phosphate
  modified_base 6: mod_base = OTHER; note = 2'-O-methylguanosine-3'-phosphate
  modified_base 7: mod_base = OTHER; note = 2'-deoxy-2'-fluorouridine-3'-phosphate
  modified_base 8: mod_base = OTHER; note = 2'-O-methyluridine-3'-phosphate
  modified_base 9: mod_base = OTHER; note = 2'-deoxy-2'-fluorouridine-3'-phosphate
  modified_base 10: mod_base = OTHER; note = 2'-deoxy-2'-fluorocytidine-3'-phosphate
  modified_base 11: mod_base = OTHER; note = 2'-deoxy-2'-fluorouridine-3'-phosphate
  modified_base 12: mod_base = OTHER; note = 2'-O-methylguanosine-3'-phosphate
  modified_base 13: mod_base = OTHER; note = 2'-O-methyladenosine-3'-phosphate
  modified_base 14: mod_base = OTHER; note = 2'-O-methyladenosine-3'-phosphate
  modified_base 15: mod_base = OTHER; note = 2'-O-methyluridine-3'-phosphate
  modified_base 16: mod_base = OTHER; note = 2'-O-methylguanosine-3'-phosphate
  modified_base 17: mod_base = OTHER; note = 2'-O-methylguanosine-3'-phosphate
  modified_base 18: mod_base = OTHER; note = 2'-O-methyladenosine-3'-phosphate
  modified_base 19: mod_base = OTHER; note = 2'-O-methyladenosine-3'-phosphate
  modified_base 20: mod_base = OTHER; note = 2'-O-methylguanosine-3'-phosphate
  modified_base 21: mod_base = OTHER; note = 2'-O-methyladenosine
tatgagtttctgaatggaaga

SEQ ID NO: 4138 - RNA, 21 nt, synthetic construct
  source 1..21: mol_type = other RNA
  modified_base 1: mod_base = OTHER; note = 2'-O-methyladenosine-3'-phosphate
  modified_base 2: mod_base = OTHER; note = 2'-O-methyluridine-3'-phosphate
  modified_base 3: mod_base = OTHER; note = 2'-O-methylguanosine-3'-phosphate
  modified_base 4: mod_base = OTHER; note = 2'-O-methyladenosine-3'-phosphate
  modified_base 5: mod_base = OTHER; note = 2'-O-methylguanosine-3'-phosphate
  modified_base 6: mod_base = OTHER; note = 2'-O-methyluridine-3'-phosphate
  modified_base 7: mod_base = OTHER; note = 2'-deoxy-2'-fluorouridine-3'-phosphate
  modified_base 8: mod_base = OTHER; note = 2'-O-methyluridine-3'-phosphate
  modified_base 9: mod_base = OTHER; note = 2'-deoxy-2'-fluorocytidine-3'-phosphate
  modified_base 10: mod_base = OTHER; note = 2'-deoxy-2'-fluorouridine-3'-phosphate
  modified_base 11: mod_base = OTHER; note = 2'-deoxy-2'-fluoroguanosine-3'-phosphate
  modified_base 12: mod_base = OTHER; note = 2'-O-methyladenosine-3'-phosphate
  modified_base 13: mod_base = OTHER; note = 2'-O-methyladenosine-3'-phosphate
  modified_base 14: mod_base = OTHER; note = 2'-O-methyluridine-3'-phosphate
  modified_base 15: mod_base = OTHER; note = 2'-O-methylguanosine-3'-phosphate
  modified_base 16: mod_base = OTHER; note = 2'-O-methylguanosine-3'-phosphate
  modified_base 17: mod_base = OTHER; note = 2'-O-methyladenosine-3'-phosphate
  modified_base 18: mod_base = OTHER; note = 2'-O-methyladenosine-3'-phosphate
  modified_base 19: mod_base = OTHER; note = 2'-O-methylguanosine-3'-phosphate
  modified_base 20: mod_base = OTHER; note = 2'-O-methyladenosine-3'-phosphate
  modified_base 21: mod_base = OTHER; note = 2'-O-methyladenosine
atgagtttctgaatggaagaa

SEQ ID NO: 4139 - RNA, 21 nt, synthetic construct
  source 1..21: mol_type = other RNA
  modified_base 1: mod_base = OTHER; note = 2'-O-methyluridine-3'-phosphate
  modified_base 2: mod_base = OTHER; note = 2'-O-methylguanosine-3'-phosphate
  modified_base 3: mod_base = OTHER; note = 2'-O-methyladenosine-3'-phosphate
  modified_base 4: mod_base = OTHER; note = 2'-O-methylguanosine-3'-phosphate
  modified_base 5: mod_base = OTHER; note = 2'-O-methyluridine-3'-phosphate
  modified_base 6: mod_base = OTHER; note = 2'-O-methyluridine-3'-phosphate
  modified_base 7: mod_base = OTHER; note = 2'-deoxy-2'-fluorouridine-3'-phosphate
  modified_base 8: mod_base = OTHER; note = 2'-O-methylcytidine-3'-phosphate
  modified_base 9: mod_base = OTHER; note = 2'-deoxy-2'-fluorouridine-3'-phosphate
  modified_base 10: mod_base = OTHER; note = 2'-deoxy-2'-fluoroguanosine-3'-phosphate
  modified_base 11: mod_base = OTHER; note = 2'-deoxy-2'-fluoroadenosine-3'-phosphate
  modified_base 12: mod_base = OTHER; note = 2'-O-methyladenosine-3'-phosphate
  modified_base 13: mod_base = OTHER; note = 2'-O-methyluridine-3'-phosphate
  modified_base 14: mod_base = OTHER; note = 2'-O-methylguanosine-3'-phosphate
  modified_base 15: mod_base = OTHER; note = 2'-O-methylguanosine-3'-phosphate
  modified_base 16: mod_base = OTHER; note = 2'-O-methyladenosine-3'-phosphate
  modified_base 17: mod_base = OTHER; note = 2'-O-methyladenosine-3'-phosphate
  modified_base 18: mod_base = OTHER; note = 2'-O-methylguanosine-3'-phosphate
  modified_base 19: mod_base = OTHER; note = 2'-O-methyladenosine-3'-phosphate
  modified_base 20: mod_base = OTHER; note = 2'-O-methylguanosine-3'-phosphate
  modified_base 21: mod_base = OTHER; note = 2'-O-methyladenosine
tgagtttctgaatggaagaga

SEQ ID NO: 4140 - RNA, 21 nt, synthetic construct
  source 1..21: mol_type = other RNA
  modified_base 1: mod_base = OTHER; note = 2'-O-methylguanosine-3'-phosphate
  modified_base 2: mod_base = OTHER; note = 2'-O-methyladenosine-3'-phosphate
  modified_base 3: mod_base = OTHER; note = 2'-O-methylguanosine-3'-phosphate
  modified_base 4: mod_base = OTHER; note = 2'-O-methyluridine-3'-phosphate
  modified_base 5: mod_base = OTHER; note = 2'-O-methyluridine-3'-phosphate
  modified_base 6: mod_base = OTHER; note = 2'-O-methyluridine-3'-phosphate
  modified_base 7: mod_base = OTHER; note = 2'-deoxy-2'-fluorocytidine-3'-phosphate
  modified_base 8: mod_base = OTHER; note = 2'-O-methyluridine-3'-phosphate
  modified_base 9: mod_base = OTHER; note = 2'-deoxy-2'-fluoroguanosine-3'-phosphate
  modified_base 10: mod_base = OTHER; note = 2'-deoxy-2'-fluoroadenosine-3'-phosphate
  modified_base 11: mod_base = OTHER; note = 2'-deoxy-2'-fluoroadenosine-3'-phosphate
  modified_base 12: mod_base = OTHER; note = 2'-O-methyluridine-3'-phosphate
  modified_base 13: mod_base = OTHER; note = 2'-O-methylguanosine-3'-phosphate
  modified_base 14: mod_base = OTHER; note = 2'-O-methylguanosine-3'-phosphate
  modified_base 15: mod_base = OTHER; note = 2'-O-methyladenosine-3'-phosphate
  modified_base 16: mod_base = OTHER; note = 2'-O-methyladenosine-3'-phosphate
  modified_base 17: mod_base = OTHER; note = 2'-O-methylguanosine-3'-phosphate
  modified_base 18: mod_base = OTHER; note = 2'-O-methyladenosine-3'-phosphate
  modified_base 19: mod_base = OTHER; note = 2'-O-methylguanosine-3'-phosphate
  modified_base 20: mod_base = OTHER; note = 2'-O-methyluridine-3'-phosphate
  modified_base 21: mod_base = OTHER; note = 2'-O-methyladenosine
gagtttctgaatggaagagta

SEQ ID NO: 4141 - RNA, 21 nt, synthetic construct
  source 1..21: mol_type = other RNA
  modified_base 1: mod_base = OTHER; note = 2'-O-methylguanosine-3'-phosphate
  modified_base 2: mod_base = OTHER; note = 2'-O-methyluridine-3'-phosphate
  modified_base 3: mod_base = OTHER; note = 2'-O-methyluridine-3'-phosphate
  modified_base 4: mod_base = OTHER; note = 2'-O-methyluridine-3'-phosphate
  modified_base 5: mod_base = OTHER; note = 2'-O-methylcytidine-3'-phosphate
  modified_base 6: mod_base = OTHER; note = 2'-O-methyluridine-3'-phosphate
  modified_base 7: mod_base = OTHER; note = 2'-deoxy-2'-fluoroguanosine-3'-phosphate
  modified_base 8: mod_base = OTHER; note = 2'-O-methyladenosine-3'-phosphate
  modified_base 9: mod_base = OTHER; note = 2'-deoxy-2'-fluoroadenosine-3'-phosphate
  modified_base 10: mod_base = OTHER; note = 2'-deoxy-2'-fluorouridine-3'-phosphate
  modified_base 11: mod_base = OTHER; note = 2'-deoxy-2'-fluoroguanosine-3'-phosphate
  modified_base 12: mod_base = OTHER; note = 2'-O-methylguanosine-3'-phosphate
  modified_base 13: mod_base = OTHER; note = 2'-O-methyladenosine-3'-phosphate
  modified_base 14: mod_base = OTHER; note = 2'-O-methyladenosine-3'-phosphate
  modified_base 15: mod_base = OTHER; note = 2'-O-methylguanosine-3'-phosphate
  modified_base 16: mod_base = OTHER; note = 2'-O-methyladenosine-3'-phosphate
  modified_base 17: mod_base = OTHER; note = 2'-O-methylguanosine-3'-phosphate
  modified_base 18: mod_base = OTHER; note = 2'-O-methyluridine-3'-phosphate
  modified_base 19: mod_base = OTHER; note = 2'-O-methylcytidine-3'-phosphate
  modified_base 20: mod_base = OTHER; note = 2'-O-methylcytidine-3'-phosphate
  modified_base 21: mod_base = OTHER; note = 2'-O-methyladenosine
gtttctgaatggaagagtcca

SEQ ID NO: 4142 - RNA, 21 nt, synthetic construct
  source 1..21: mol_type = other RNA
  modified_base 1: mod_base = OTHER; note = 2'-O-methyluridine-3'-phosphate
  modified_base 2: mod_base = OTHER; note = 2'-O-methyluridine-3'-phosphate
  modified_base 3: mod_base = OTHER; note = 2'-O-methyluridine-3'-phosphate
  modified_base 4: mod_base = OTHER; note = 2'-O-methylcytidine-3'-phosphate
  modified_base 5: mod_base = OTHER; note = 2'-O-methyluridine-3'-phosphate
  modified_base 6: mod_base = OTHER; note = 2'-O-methylguanosine-3'-phosphate
  modified_base 7: mod_base = OTHER; note = 2'-deoxy-2'-fluoroadenosine-3'-phosphate
  modified_base 8: mod_base = OTHER; note = 2'-O-methyladenosine-3'-phosphate
  modified_base 9: mod_base = OTHER; note = 2'-deoxy-2'-fluorouridine-3'-phosphate
  modified_base 10: mod_base = OTHER; note = 2'-deoxy-2'-fluoroguanosine-3'-phosphate
  modified_base 11: mod_base = OTHER; note = 2'-deoxy-2'-fluoroguanosine-3'-phosphate
  modified_base 12: mod_base = OTHER; note = 2'-O-methyladenosine-3'-phosphate
  modified_base 13: mod_base = OTHER; note = 2'-O-methyladenosine-3'-phosphate
  modified_base 14: mod_base = OTHER; note = 2'-O-methylguanosine-3'-phosphate
  modified_base 15: mod_base = OTHER; note = 2'-O-methyladenosine-3'-phosphate
  modified_base 16: mod_base = OTHER; note = 2'-O-methylguanosine-3'-phosphate
  modified_base 17: mod_base = OTHER; note = 2'-O-methyluridine-3'-phosphate
  modified_base 18: mod_base = OTHER; note = 2'-O-methylcytidine-3'-phosphate
  modified_base 19: mod_base = OTHER; note = 2'-O-methylcytidine-3'-phosphate
  modified_base 20: mod_base = OTHER; note = 2'-O-methyladenosine-3'-phosphate
  modified_base 21: mod_base = OTHER; note = 2'-O-methyladenosine
tttctgaatggaagagtccaa

SEQ ID NO: 4143 - RNA, 21 nt, synthetic construct
  source 1..21: mol_type = other RNA
  modified_base 1: mod_base = OTHER; note = 2'-O-methyluridine-3'-phosphate
  modified_base 2: mod_base = OTHER; note = 2'-O-methyluridine-3'-phosphate
  modified_base 3: mod_base = OTHER; note = 2'-O-methylcytidine-3'-phosphate
  modified_base 4: mod_base = OTHER; note = 2'-O-methyluridine-3'-phosphate
  modified_base 5: mod_base = OTHER; note = 2'-O-methylguanosine-3'-phosphate
  modified_base 6: mod_base = OTHER; note = 2'-O-methyladenosine-3'-phosphate
  modified_base 7: mod_base = OTHER; note = 2'-deoxy-2'-fluoroadenosine-3'-phosphate
  modified_base 8: mod_base = OTHER; note = 2'-O-methyluridine-3'-phosphate
  modified_base 9: mod_base = OTHER; note = 2'-deoxy-2'-fluoroguanosine-3'-phosphate
  modified_base 10: mod_base = OTHER; note = 2'-deoxy-2'-fluoroguanosine-3'-phosphate
  modified_base 11: mod_base = OTHER; note = 2'-deoxy-2'-fluoroadenosine-3'-phosphate
  modified_base 12: mod_base = OTHER; note = 2'-O-methyladenosine-3'-phosphate
  modified_base 13: mod_base = OTHER; note = 2'-O-methylguanosine-3'-phosphate
  modified_base 14: mod_base = OTHER; note = 2'-O-methyladenosine-3'-phosphate
  modified_base 15: mod_base = OTHER; note = 2'-O-methylguanosine-3'-phosphate
  modified_base 16: mod_base = OTHER; note = 2'-O-methyluridine-3'-phosphate
  modified_base 17: mod_base = OTHER; note = 2'-O-methylcytidine-3'-phosphate
  modified_base 18: mod_base = OTHER; note = 2'-O-methylcytidine-3'-phosphate
  modified_base 19: mod_base = OTHER; note = 2'-O-methyladenosine-3'-phosphate
  modified_base 20: mod_base = OTHER; note = 2'-O-methyladenosine-3'-phosphate
  modified_base 21: mod_base = OTHER; note = 2'-O-methyladenosine
ttctgaatggaagagtccaaa

SEQ ID NO: 4144 - RNA, 21 nt, synthetic construct
  source 1..21: mol_type = other RNA
  modified_base 1: mod_base = OTHER; note = 2'-O-methyluridine-3'-phosphate
  modified_base 2: mod_base = OTHER; note = 2'-O-methylcytidine-3'-phosphate
  modified_base 3: mod_base = OTHER; note = 2'-O-methyluridine-3'-phosphate
  modified_base 4: mod_base = OTHER; note = 2'-O-methylguanosine-3'-phosphate
  modified_base 5: mod_base = OTHER; note = 2'-O-methyladenosine-3'-phosphate
  modified_base 6: mod_base = OTHER; note = 2'-O-methyladenosine-3'-phosphate
  modified_base 7: mod_base = OTHER; note = 2'-deoxy-2'-fluorouridine-3'-phosphate
  modified_base 8: mod_base = OTHER; note = 2'-O-methylguanosine-3'-phosphate
  modified_base 9: mod_base = OTHER; note = 2'-deoxy-2'-fluoroguanosine-3'-phosphate
  modified_base 10: mod_base = OTHER; note = 2'-deoxy-2'-fluoroadenosine-3'-phosphate
  modified_base 11: mod_base = OTHER; note = 2'-deoxy-2'-fluoroadenosine-3'-phosphate
  modified_base 12: mod_base = OTHER; note = 2'-O-methylguanosine-3'-phosphate
  modified_base 13: mod_base = OTHER; note = 2'-O-methyladenosine-3'-phosphate
  modified_base 14: mod_base = OTHER; note = 2'-O-methylguanosine-3'-phosphate
  modified_base 15: mod_base = OTHER; note = 2'-O-methyluridine-3'-phosphate
  modified_base 16: mod_base = OTHER; note = 2'-O-methylcytidine-3'-phosphate
  modified_base 17: mod_base = OTHER; note = 2'-O-methylcytidine-3'-phosphate
  modified_base 18: mod_base = OTHER; note = 2'-O-methyladenosine-3'-phosphate
  modified_base 19: mod_base = OTHER; note = 2'-O-methyladenosine-3'-phosphate
  modified_base 20: mod_base = OTHER; note = 2'-O-methyluridine-3'-phosphate
  modified_base 21: mod_base = OTHER; note = 2'-O-methyladenosine
tctgaatggaagagtccaata

SEQ ID NO: 4145 - RNA, 21 nt, synthetic construct
  source 1..21: mol_type = other RNA
  modified_base 1: mod_base = OTHER; note = 2'-O-methylcytidine-3'-phosphate
  modified_base 2: mod_base = OTHER; note = 2'-O-methyluridine-3'-phosphate
  modified_base 3: mod_base = OTHER; note = 2'-O-methylguanosine-3'-phosphate
  modified_base 4: mod_base = OTHER; note = 2'-O-methyladenosine-3'-phosphate
  modified_base 5: mod_base = OTHER; note = 2'-O-methyladenosine-3'-phosphate
  modified_base 6: mod_base = OTHER; note = 2'-O-methyluridine-3'-phosphate
  modified_base 7: mod_base = OTHER; note = 2'-deoxy-2'-fluoroguanosine-3'-phosphate
  modified_base 8: mod_base = OTHER; note = 2'-O-methylguanosine-3'-phosphate
  modified_base 9: mod_base = OTHER; note = 2'-deoxy-2'-fluoroadenosine-3'-phosphate
  modified_base 10: mod_base = OTHER; note = 2'-deoxy-2'-fluoroadenosine-3'-phosphate
  modified_base 11: mod_base = OTHER; note = 2'-deoxy-2'-fluoroguanosine-3'-phosphate
  modified_base 12: mod_base = OTHER; note = 2'-O-methyladenosine-3'-phosphate
  modified_base 13: mod_base = OTHER; note = 2'-O-methylguanosine-3'-phosphate
  modified_base 14: mod_base = OTHER; note = 2'-O-methyluridine-3'-phosphate
  modified_base 15: mod_base = OTHER; note = 2'-O-methylcytidine-3'-phosphate
  modified_base 16: mod_base = OTHER; note = 2'-O-methylcytidine-3'-phosphate
  modified_base 17: mod_base = OTHER; note = 2'-O-methyladenosine-3'-phosphate
  modified_base 18: mod_base = OTHER; note = 2'-O-methyladenosine-3'-phosphate
  modified_base 19: mod_base = OTHER; note = 2'-O-methyluridine-3'-phosphate
  modified_base 20: mod_base = OTHER; note = 2'-O-methylcytidine-3'-phosphate
  modified_base 21: mod_base = OTHER; note = 2'-O-methyladenosine
ctgaatggaagagtccaatca

SEQ ID NO: 4146 - RNA, 21 nt, synthetic construct
  source 1..21: mol_type = other RNA
  modified_base 1: mod_base = OTHER; note = 2'-O-methylguanosine-3'-phosphate
  modified_base 2: mod_base = OTHER; note = 2'-O-methyladenosine-3'-phosphate
  modified_base 3: mod_base = OTHER; note = 2'-O-methyladenosine-3'-phosphate
  modified_base 4: mod_base = OTHER; note = 2'-O-methyluridine-3'-phosphate
  modified_base 5: mod_base = OTHER; note = 2'-O-methylguanosine-3'-phosphate
  modified_base 6: mod_base = OTHER; note = 2'-O-methylguanosine-3'-phosphate
  modified_base 7: mod_base = OTHER; note = 2'-deoxy-2'-fluoroadenosine-3'-phosphate
  modified_base 8: mod_base = OTHER; note = 2'-O-methyladenosine-3'-phosphate
  modified_base 9: mod_base = OTHER; note = 2'-deoxy-2'-fluoroguanosine-3'-phosphate
  modified_base 10: mod_base = OTHER; note = 2'-deoxy-2'-fluoroadenosine-3'-phosphate
  modified_base 11: mod_base = OTHER; note = 2'-deoxy-2'-fluoroguanosine-3'-phosphate
  modified_base 12: mod_base = OTHER; note = 2'-O-methyluridine-3'-phosphate
  modified_base 13: mod_base = OTHER; note = 2'-O-methylcytidine-3'-phosphate
  modified_base 14: mod_base = OTHER; note = 2'-O-methylcytidine-3'-phosphate
  modified_base 15: mod_base = OTHER; note = 2'-O-methyladenosine-3'-phosphate
  modified_base 16: mod_base = OTHER; note = 2'-O-methyladenosine-3'-phosphate
  modified_base 17: mod_base = OTHER; note = 2'-O-methyluridine-3'-phosphate
  modified_base 18: mod_base = OTHER; note = 2'-O-methylcytidine-3'-phosphate
  modified_base 19: mod_base = OTHER; note = 2'-O-methylcytidine-3'-phosphate
  modified_base 20: mod_base = OTHER; note = 2'-O-methyladenosine-3'-phosphate
  modified_base 21: mod_base = OTHER; note = 2'-O-methyladenosine
gaatggaagagtccaatccaa

SEQ ID NO: 4147 - RNA, 21 nt, synthetic construct
  source 1..21: mol_type = other RNA
  modified_base 1: mod_base = OTHER; note = 2'-O-methylguanosine-3'-phosphate
  modified_base 2: mod_base = OTHER; note = 2'-O-methyladenosine-3'-phosphate
  modified_base 3: mod_base = OTHER; note = 2'-O-methyladenosine-3'-phosphate
  modified_base 4: mod_base = OTHER; note = 2'-O-methylcytidine-3'-phosphate
  modified_base 5: mod_base = OTHER; note = 2'-O-methyluridine-3'-phosphate
  modified_base 6: mod_base = OTHER; note = 2'-O-methylcytidine-3'-phosphate
  modified_base 7: mod_base = OTHER; note = 2'-deoxy-2'-fluorouridine-3'-phosphate
  modified_base 8: mod_base = OTHER; note = 2'-O-methylguanosine-3'-phosphate
  modified_base 9: mod_base = OTHER; note = 2'-deoxy-2'-fluorouridine-3'-phosphate
  modified_base 10: mod_base = OTHER; note = 2'-deoxy-2'-fluoroguanosine-3'-phosphate
  modified_base 11: mod_base = OTHER; note = 2'-deoxy-2'-fluorocytidine-3'-phosphate
  modified_base 12: mod_base = OTHER; note = 2'-O-methyluridine-3'-phosphate
  modified_base 13: mod_base = OTHER; note = 2'-O-methylguanosine-3'-phosphate
  modified_base 14: mod_base = OTHER; note = 2'-O-methylguanosine-3'-phosphate
  modified_base 15: mod_base = OTHER; note = 2'-O-methylguanosine-3'-phosphate
  modified_base 16: mod_base = OTHER; note = 2'-O-methylcytidine-3'-phosphate
  modified_base 17: mod_base = OTHER; note = 2'-O-methyladenosine-3'-phosphate
  modified_base 18: mod_base = OTHER; note = 2'-O-methyluridine-3'-phosphate
  modified_base 19: mod_base = OTHER; note = 2'-O-methyluridine-3'-phosphate
  modified_base 20: mod_base = OTHER; note = 2'-O-methyluridine-3'-phosphate
  modified_base 21: mod_base = OTHER; note = 2'-O-methyladenosine
gaactctgtgctgggcattta

SEQ ID NO: 4148 - RNA, 21 nt, synthetic construct
  source 1..21: mol_type = other RNA
  modified_base 1: mod_base = OTHER; note = 2'-O-methyladenosine-3'-phosphate
  modified_base 2: mod_base = OTHER; note = 2'-O-methyladenosine-3'-phosphate
  modified_base 3: mod_base = OTHER; note = 2'-O-methylcytidine-3'-phosphate
  modified_base 4: mod_base = OTHER; note = 2'-O-methyluridine-3'-phosphate
  modified_base 5: mod_base = OTHER; note = 2'-O-methylcytidine-3'-phosphate
  modified_base 6: mod_base = OTHER; note = 2'-O-methyluridine-3'-phosphate
  modified_base 7: mod_base = OTHER; note = 2'-deoxy-2'-fluoroguanosine-3'-phosphate
  modified_base 8: mod_base = OTHER; note = 2'-O-methyluridine-3'-phosphate
  modified_base 9: mod_base = OTHER; note = 2'-deoxy-2'-fluoroguanosine-3'-phosphate
  modified_base 10: mod_base = OTHER; note = 2'-deoxy-2'-fluorocytidine-3'-phosphate
  modified_base 11: mod_base = OTHER; note = 2'-deoxy-2'-fluorouridine-3'-phosphate
  modified_base 12: mod_base = OTHER; note = 2'-O-methylguanosine-3'-phosphate
  modified_base 13: mod_base = OTHER; note = 2'-O-methylguanosine-3'-phosphate
  modified_base 14: mod_base = OTHER; note = 2'-O-methylguanosine-3'-phosphate
  modified_base 15: mod_base = OTHER; note = 2'-O-methylcytidine-3'-phosphate
  modified_base 16: mod_base = OTHER; note = 2'-O-methyladenosine-3'-phosphate
  modified_base 17: mod_base = OTHER; note = 2'-O-methyluridine-3'-phosphate
  modified_base 18: mod_base = OTHER; note = 2'-O-methyluridine-3'-phosphate
  modified_base 19: mod_base = OTHER; note = 2'-O-methyluridine-3'-phosphate
  modified_base 20: mod_base = OTHER; note = 2'-O-methylguanosine-3'-phosphate
  modified_base 21: mod_base = OTHER; note = 2'-O-methyladenosine
aactctgtgctgggcatttga

SEQ ID NO: 4149 - RNA, 21 nt, synthetic construct
  source 1..21: mol_type = other RNA
  modified_base 1: mod_base = OTHER; note = 2'-O-methylcytidine-3'-phosphate
  modified_base 2: mod_base = OTHER; note = 2'-O-methyluridine-3'-phosphate
  modified_base 3: mod_base = OTHER; note = 2'-O-methylcytidine-3'-phosphate
  modified_base 4: mod_base = OTHER; note = 2'-O-methyluridine-3'-phosphate
  modified_base 5: mod_base = OTHER; note = 2'-O-methylguanosine-3'-phosphate
  modified_base 6: mod_base = OTHER; note = 2'-O-methyluridine-3'-phosphate
  modified_base 7: mod_base = OTHER; note = 2'-deoxy-2'-fluoroguanosine-3'-phosphate
  modified_base 8: mod_base = OTHER; note = 2'-O-methylcytidine-3'-phosphate
  modified_base 9: mod_base = OTHER; note = 2'-deoxy-2'-fluorouridine-3'-phosphate
  modified_base 10: mod_base = OTHER; note = 2'-deoxy-2'-fluoroguanosine-3'-phosphate
  modified_base 11: mod_base = OTHER; note = 2'-deoxy-2'-fluoroguanosine-3'-phosphate
  modified_base 12: mod_base = OTHER; note = 2'-O-methylguanosine-3'-phosphate
  modified_base 13: mod_base = OTHER; note = 2'-O-methylcytidine-3'-phosphate
  modified_base 14: mod_base = OTHER; note = 2'-O-methyladenosine-3'-phosphate
  modified_base 15: mod_base = OTHER; note = 2'-O-methyluridine-3'-phosphate
  modified_base 16: mod_base = OTHER; note = 2'-O-methyluridine-3'-phosphate
  modified_base 17: mod_base = OTHER; note = 2'-O-methyluridine-3'-phosphate
  modified_base 18: mod_base = OTHER; note = 2'-O-methylguanosine-3'-phosphate
  modified_base 19: mod_base = OTHER; note = 2'-O-methylguanosine-3'-phosphate
  modified_base 20: mod_base = OTHER; note = 2'-O-methylcytidine-3'-phosphate
  modified_base 21: mod_base = OTHER; note = 2'-O-methyladenosine
ctctgtgctgggcatttggca

SEQ ID NO: 4150 - RNA, 21 nt, synthetic construct
  source 1..21: mol_type = other RNA
  modified_base 1: mod_base = OTHER; note = 2'-O-methyluridine-3'-phosphate
  modified_base 2: mod_base = OTHER; note = 2'-O-methylcytidine-3'-phosphate
  modified_base 3: mod_base = OTHER; note = 2'-O-methyluridine-3'-phosphate
  modified_base 4: mod_base = OTHER; note = 2'-O-methylguanosine-3'-phosphate
  modified_base 5: mod_base = OTHER; note = 2'-O-methyluridine-3'-phosphate
  modified_base 6: mod_base = OTHER; note = 2'-O-methylguanosine-3'-phosphate
  modified_base 7: mod_base = OTHER; note = 2'-deoxy-2'-fluorocytidine-3'-phosphate
  modified_base 8: mod_base = OTHER; note = 2'-O-methyluridine-3'-phosphate
  modified_base 9: mod_base = OTHER; note = 2'-deoxy-2'-fluoroguanosine-3'-phosphate
  modified_base 10: mod_base = OTHER; note = 2'-deoxy-2'-fluoroguanosine-3'-phosphate
  modified_base 11: mod_base = OTHER; note = 2'-deoxy-2'-fluoroguanosine-3'-phosphate
  modified_base 12: mod_base = OTHER; note = 2'-O-methylcytidine-3'-phosphate
  modified_base 13: mod_base = OTHER; note = 2'-O-methyladenosine-3'-phosphate
  modified_base 14: mod_base = OTHER; note = 2'-O-methyluridine-3'-phosphate
  modified_base 15: mod_base = OTHER; note = 2'-O-methyluridine-3'-phosphate
  modified_base 16: mod_base = OTHER; note = 2'-O-methyluridine-3'-phosphate
  modified_base 17: mod_base = OTHER; note = 2'-O-methylguanosine-3'-phosphate
  modified_base 18: mod_base = OTHER; note = 2'-O-methylguanosine-3'-phosphate
  modified_base 19: mod_base = OTHER; note = 2'-O-methylcytidine-3'-phosphate
  modified_base 20: mod_base = OTHER; note = 2'-O-methylcytidine-3'-phosphate
  modified_base 21: mod_base = OTHER; note = 2'-O-methyladenosine
tctgtgctgggcatttggcca

SEQ ID NO: 4151 - RNA, 21 nt, synthetic construct
  source 1..21: mol_type = other RNA
  modified_base 1: mod_base = OTHER; note = 2'-O-methyluridine-3'-phosphate
  modified_base 2: mod_base = OTHER; note = 2'-O-methylguanosine-3'-phosphate
  modified_base 3: mod_base = OTHER; note = 2'-O-methyluridine-3'-phosphate
  modified_base 4: mod_base = OTHER; note = 2'-O-methylguanosine-3'-phosphate
  modified_base 5: mod_base = OTHER; note = 2'-O-methylcytidine-3'-phosphate
  modified_base 6: mod_base = OTHER; note = 2'-O-methyluridine-3'-phosphate
  modified_base 7: mod_base = OTHER; note = 2'-deoxy-2'-fluoroguanosine-3'-phosphate
  modified_base 8: mod_base = OTHER; note = 2'-O-methylguanosine-3'-phosphate
  modified_base 9: mod_base = OTHER; note = 2'-deoxy-2'-fluoroguanosine-3'-phosphate
  modified_base 10: mod_base = OTHER; note = 2'-deoxy-2'-fluorocytidine-3'-phosphate
  modified_base 11: mod_base = OTHER; note = 2'-deoxy-2'-fluoroadenosine-3'-phosphate
  modified_base 12: mod_base = OTHER; note = 2'-O-methyluridine-3'-phosphate
  modified_base 13: mod_base = OTHER; note = 2'-O-methyluridine-3'-phosphate
  modified_base 14: mod_base = OTHER; note = 2'-O-methyluridine-3'-phosphate
  modified_base 15: mod_base = OTHER; note = 2'-O-methylguanosine-3'-phosphate
  modified_base 16: mod_base = OTHER; note = 2'-O-methylguanosine-3'-phosphate
  modified_base 17: mod_base = OTHER; note = 2'-O-methylcytidine-3'-phosphate
  modified_base 18: mod_base = OTHER; note = 2'-O-methylcytidine-3'-phosphate
  modified_base 19: mod_base = OTHER; note = 2'-O-methylguanosine-3'-phosphate
  modified_base 20: mod_base = OTHER; note = 2'-O-methylguanosine-3'-phosphate
  modified_base 21: mod_base = OTHER; note = 2'-O-methyladenosine
tgtgctgggcatttggccgga

SEQ ID NO: 4152 - RNA, 21 nt, synthetic construct
  source 1..21: mol_type = other RNA
  modified_base 1: mod_base = OTHER; note = 2'-O-methylguanosine-3'-phosphate
  modified_base 2: mod_base = OTHER; note = 2'-O-methyluridine-3'-phosphate
  modified_base 3: mod_base = OTHER; note = 2'-O-methylguanosine-3'-phosphate
  modified_base 4: mod_base = OTHER; note = 2'-O-methylcytidine-3'-phosphate
  modified_base 5: mod_base = OTHER; note = 2'-O-methyluridine-3'-phosphate
  modified_base 6: mod_base = OTHER; note = 2'-O-methylguanosine-3'-phosphate
  modified_base 7: mod_base = OTHER; note = 2'-deoxy-2'-fluoroguanosine-3'-phosphate
  modified_base 8: mod_base = OTHER; note = 2'-O-methylguanosine-3'-phosphate
  modified_base 9: mod_base = OTHER; note = 2'-deoxy-2'-fluorocytidine-3'-phosphate
  modified_base 10: mod_base = OTHER; note = 2'-deoxy-2'-fluoroadenosine-3'-phosphate
  modified_base 11: mod_base = OTHER; note = 2'-deoxy-2'-fluorouridine-3'-phosphate
  modified_base 12: mod_base = OTHER; note = 2'-O-methyluridine-3'-phosphate
  modified_base 13: mod_base = OTHER; note = 2'-O-methyluridine-3'-phosphate
  modified_base 14: mod_base = OTHER; note = 2'-O-methylguanosine-3'-phosphate
  modified_base 15: mod_base = OTHER; note = 2'-O-methylguanosine-3'-phosphate
  modified_base 16: mod_base = OTHER; note = 2'-O-methylcytidine-3'-phosphate
  modified_base 17: mod_base = OTHER; note = 2'-O-methylcytidine-3'-phosphate
  modified_base 18: mod_base = OTHER; note = 2'-O-methylguanosine-3'-phosphate
  modified_base 19: mod_base = OTHER; note = 2'-O-methylguanosine-3'-phosphate
  modified_base 20: mod_base = OTHER; note = 2'-O-methyladenosine-3'-phosphate
  modified_base 21: mod_base = OTHER; note = 2'-O-methyladenosine
gtgctgggcatttggccggaa

SEQ ID NO: 4153 - RNA, 21 nt, synthetic construct
  source 1..21: mol_type = other RNA
  modified_base 1: mod_base = OTHER; note = 2'-O-methyluridine-3'-phosphate
  modified_base 2: mod_base = OTHER; note = 2'-O-methylguanosine-3'-phosphate
  modified_base 3: mod_base = OTHER; note = 2'-O-methylcytidine-3'-phosphate
  modified_base 4: mod_base = OTHER; note = 2'-O-methyluridine-3'-phosphate
  modified_base 5: mod_base = OTHER; note = 2'-O-methylguanosine-3'-phosphate
  modified_base 6: mod_base = OTHER; note = 2'-O-methylguanosine-3'-phosphate
  modified_base 7: mod_base = OTHER; note = 2'-deoxy-2'-fluoroguanosine-3'-phosphate
  modified_base 8: mod_base = OTHER; note = 2'-O-methylcytidine-3'-phosphate
  modified_base 9: mod_base = OTHER; note = 2'-deoxy-2'-fluoroadenosine-3'-phosphate
  modified_base 10: mod_base = OTHER; note = 2'-deoxy-2'-fluorouridine-3'-phosphate
  modified_base 11: mod_base = OTHER; note = 2'-deoxy-2'-fluorouridine-3'-phosphate
  modified_base 12: mod_base = OTHER; note = 2'-O-methyluridine-3'-phosphate
  modified_base 13: mod_base = OTHER; note = 2'-O-methylguanosine-3'-phosphate
  modified_base 14: mod_base = OTHER; note = 2'-O-methylguanosine-3'-phosphate
  modified_base 15: mod_base = OTHER; note = 2'-O-methylcytidine-3'-phosphate
  modified_base 16: mod_base = OTHER; note = 2'-O-methylcytidine-3'-phosphate
  modified_base 17: mod_base = OTHER; note = 2'-O-methylguanosine-3'-phosphate
  modified_base 18: mod_base = OTHER; note = 2'-O-methylguanosine-3'-phosphate
  modified_base 19: mod_base = OTHER; note = 2'-O-methyladenosine-3'-phosphate
  modified_base 20: mod_base = OTHER; note = 2'-O-methylguanosine-3'-phosphate
  modified_base 21: mod_base = OTHER; note = 2'-O-methyladenosine
tgctgggcatttggccggaga

SEQ ID NO: 4154 - RNA, 21 nt, synthetic construct
  source 1..21: mol_type = other RNA
  modified_base 1: mod_base = OTHER; note = 2'-O-methylcytidine-3'-phosphate
  modified_base 2: mod_base = OTHER; note = 2'-O-methyluridine-3'-phosphate
  modified_base 3: mod_base = OTHER; note = 2'-O-methyluridine-3'-phosphate
  modified_base 4: mod_base = OTHER; note = 2'-O-methylcytidine-3'-phosphate
  modified_base 5: mod_base = OTHER; note = 2'-O-methylguanosine-3'-phosphate
  modified_base 6: mod_base = OTHER; note = 2'-O-methyladenosine-3'-phosphate
  modified_base 7: mod_base = OTHER; note = 2'-deoxy-2'-fluoroguanosine-3'-phosphate
  modified_base 8: mod_base = OTHER; note = 2'-O-methyladenosine-3'-phosphate
  modified_base 9: mod_base = OTHER; note = 2'-deoxy-2'-fluoroadenosine-3'-phosphate
  modified_base 10: mod_base = OTHER; note = 2'-deoxy-2'-fluoroguanosine-3'-phosphate
  modified_base 11: mod_base = OTHER; note = 2'-deoxy-2'-fluoroguanosine-3'-phosphate
  modified_base 12: mod_base = OTHER; note = 2'-O-methyladenosine-3'-phosphate
  modified_base 13: mod_base = OTHER; note = 2'-O-methylcytidine-3'-phosphate
  modified_base 14: mod_base = OTHER; note = 2'-O-methyladenosine-3'-phosphate
  modified_base 15: mod_base = OTHER; note = 2'-O-methyladenosine-3'-phosphate
  modified_base 16: mod_base = OTHER; note = 2'-O-methyladenosine-3'-phosphate
  modified_base 17: mod_base = OTHER; note = 2'-O-methyluridine-3'-phosphate
  modified_base 18: mod_base = OTHER; note = 2'-O-methyladenosine-3'-phosphate
  modified_base 19: mod_base = OTHER; note = 2'-O-methylcytidine-3'-phosphate
  modified_base 20: mod_base = OTHER; note = 2'-O-methyladenosine-3'-phosphate
  modified_base 21: mod_base = OTHER; note = 2'-O-methyladenosine
cttcgagaaggacaaatacaa

SEQ ID NO: 4155 - RNA, 21 nt, synthetic construct
  source 1..21: mol_type = other RNA
  modified_base 1: mod_base = OTHER; note = 2'-O-methyluridine-3'-phosphate
  modified_base 2: mod_base = OTHER; note = 2'-O-methyluridine-3'-phosphate
  modified_base 3: mod_base = OTHER; note = 2'-O-methylcytidine-3'-phosphate
  modified_base 4: mod_base = OTHER; note = 2'-O-methylguanosine-3'-phosphate
  modified_base 5: mod_base = OTHER; note = 2'-O-methyladenosine-3'-phosphate
  modified_base 6: mod_base = OTHER; note = 2'-O-methylguanosine-3'-phosphate
  modified_base 7: mod_base = OTHER; note = 2'-deoxy-2'-fluoroadenosine-3'-phosphate
  modified_base 8: mod_base = OTHER; note = 2'-O-methyladenosine-3'-phosphate
  modified_base 9: mod_base = OTHER; note = 2'-deoxy-2'-fluoroguanosine-3'-phosphate
  modified_base 10: mod_base = OTHER; note = 2'-deoxy-2'-fluoroguanosine-3'-phosphate
  modified_base 11: mod_base = OTHER; note = 2'-deoxy-2'-fluoroadenosine-3'-phosphate
  modified_base 12: mod_base = OTHER; note = 2'-O-methylcytidine-3'-phosphate
  modified_base 13: mod_base = OTHER; note = 2'-O-methyladenosine-3'-phosphate
  modified_base 14: mod_base = OTHER; note = 2'-O-methyladenosine-3'-phosphate
  modified_base 15: mod_base = OTHER; note = 2'-O-methyladenosine-3'-phosphate
  modified_base 16: mod_base = OTHER; note = 2'-O-methyluridine-3'-phosphate
  modified_base 17: mod_base = OTHER; note = 2'-O-methyladenosine-3'-phosphate
  modified_base 18: mod_base = OTHER; note = 2'-O-methylcytidine-3'-phosphate
  modified_base 19: mod_base = OTHER; note = 2'-O-methyladenosine-3'-phosphate
  modified_base 20: mod_base = OTHER; note = 2'-O-methyluridine-3'-phosphate
  modified_base 21: mod_base = OTHER; note = 2'-O-methyladenosine
ttcgagaaggacaaatacata

SEQ ID NO: 4156 - RNA, 21 nt, synthetic construct
  source 1..21: mol_type = other RNA
  modified_base 1: mod_base = OTHER; note = 2'-O-methyluridine-3'-phosphate
  modified_base 2: mod_base = OTHER; note = 2'-O-methylcytidine-3'-phosphate
  modified_base 3: mod_base = OTHER; note = 2'-O-methylguanosine-3'-phosphate
  modified_base 4: mod_base = OTHER; note = 2'-O-methyladenosine-3'-phosphate
  modified_base 5: mod_base = OTHER; note = 2'-O-methylguanosine-3'-phosphate
  modified_base 6: mod_base = OTHER; note = 2'-O-methyladenosine-3'-phosphate
  modified_base 7: mod_base = OTHER; note = 2'-deoxy-2'-fluoroadenosine-3'-phosphate
  modified_base 8: mod_base = OTHER; note = 2'-O-methylguanosine-3'-phosphate
  modified_base 9: mod_base = OTHER; note = 2'-deoxy-2'-fluoroguanosine-3'-phosphate
  modified_base 10: mod_base = OTHER; note = 2'-deoxy-2'-fluoroadenosine-3'-phosphate
  modified_base 11: mod_base = OTHER; note = 2'-deoxy-2'-fluorocytidine-3'-phosphate
  modified_base 12: mod_base = OTHER; note = 2'-O-methyladenosine-3'-phosphate
  modified_base 13: mod_base = OTHER; note = 2'-O-methyladenosine-3'-phosphate
  modified_base 14: mod_base = OTHER; note = 2'-O-methyladenosine-3'-phosphate
  modified_base 15: mod_base = OTHER; note = 2'-O-methyluridine-3'-phosphate
  modified_base 16: mod_base = OTHER; note = 2'-O-methyladenosine-3'-phosphate
  modified_base 17: mod_base = OTHER; note = 2'-O-methylcytidine-3'-phosphate
  modified_base 18: mod_base = OTHER; note = 2'-O-methyladenosine-3'-phosphate
  modified_base 19: mod_base = OTHER; note = 2'-O-methyluridine-3'-phosphate
  modified_base 20: mod_base = OTHER; note = 2'-O-methyluridine-3'-phosphate
  modified_base 21: mod_base = OTHER; note = 2'-O-methyladenosine
tcgagaaggacaaatacatta

SEQ ID NO: 4157 - RNA, 21 nt, synthetic construct
  source 1..21: mol_type = other RNA
  modified_base 1: mod_base = OTHER; note = 2'-O-methylcytidine-3'-phosphate
  modified_base 2: mod_base = OTHER; note = 2'-O-methylguanosine-3'-phosphate
  modified_base 3: mod_base = OTHER; note = 2'-O-methyladenosine-3'-phosphate
  modified_base 4: mod_base = OTHER; note = 2'-O-methylguanosine-3'-phosphate
  modified_base 5: mod_base = OTHER; note = 2'-O-methyladenosine-3'-phosphate
  modified_base 6: mod_base = OTHER; note = 2'-O-methyladenosine-3'-phosphate
  modified_base 7: mod_base = OTHER; note = 2'-deoxy-2'-fluoroguanosine-3'-phosphate
  modified_base 8: mod_base = OTHER; note = 2'-O-methylguanosine-3'-phosphate
  modified_base 9: mod_base = OTHER; note = 2'-deoxy-2'-fluoroadenosine-3'-phosphate
  modified_base 10: mod_base = OTHER; note = 2'-deoxy-2'-fluorocytidine-3'-phosphate
  modified_base 11: mod_base = OTHER; note = 2'-deoxy-2'-fluoroadenosine-3'-phosphate
  modified_base 12: mod_base = OTHER; note = 2'-O-methyladenosine-3'-phosphate
  modified_base 13: mod_base = OTHER; note = 2'-O-methyladenosine-3'-phosphate
  modified_base 14: mod_base = OTHER; note = 2'-O-methyluridine-3'-phosphate
  modified_base 15: mod_base = OTHER; note = 2'-O-methyladenosine-3'-phosphate
  modified_base 16: mod_base = OTHER; note = 2'-O-methylcytidine-3'-phosphate
  modified_base 17: mod_base = OTHER; note = 2'-O-methyladenosine-3'-phosphate
  modified_base 18: mod_base = OTHER; note = 2'-O-methyluridine-3'-phosphate
  modified_base 19: mod_base = OTHER; note = 2'-O-methyluridine-3'-phosphate
  modified_base 20: mod_base = OTHER; note = 2'-O-methyluridine-3'-phosphate
  modified_base 21: mod_base = OTHER; note = 2'-O-methyladenosine
cgagaaggacaaatacattta

SEQ ID NO: 4158 - RNA, 21 nt, synthetic construct
  source 1..21: mol_type = other RNA
  modified_base 1: mod_base = OTHER; note = 2'-O-methylguanosine-3'-phosphate
  modified_base 2: mod_base = OTHER; note = 2'-O-methyladenosine-3'-phosphate
  modified_base 3: mod_base = OTHER; note = 2'-O-methylguanosine-3'-phosphate
  modified_base 4: mod_base = OTHER; note = 2'-O-methyladenosine-3'-phosphate
  modified_base 5: mod_base = OTHER; note = 2'-O-methyladenosine-3'-phosphate
  modified_base 6: mod_base = OTHER; note = 2'-O-methylguanosine-3'-phosphate
  modified_base 7: mod_base = OTHER; note = 2'-deoxy-2'-fluoroguanosine-3'-phosphate
  modified_base 8: mod_base = OTHER; note = 2'-O-methyladenosine-3'-phosphate
  modified_base 9: mod_base = OTHER; note = 2'-deoxy-2'-fluorocytidine-3'-phosphate
  modified_base 10: mod_base = OTHER; note = 2'-deoxy-2'-fluoroadenosine-3'-phosphate
  modified_base 11: mod_base = OTHER; note = 2'-deoxy-2'-fluoroadenosine-3'-phosphate
  modified_base 12: mod_base = OTHER; note = 2'-O-methyladenosine-3'-phosphate
  modified_base 13: mod_base = OTHER; note = 2'-O-methyluridine-3'-phosphate
  modified_base 14: mod_base = OTHER; note = 2'-O-methyladenosine-3'-phosphate
  modified_base 15: mod_base = OTHER; note = 2'-O-methylcytidine-3'-phosphate
  modified_base 16: mod_base = OTHER; note = 2'-O-methyladenosine-3'-phosphate
  modified_base 17: mod_base = OTHER; note = 2'-O-methyluridine-3'-phosphate
  modified_base 18: mod_base = OTHER; note = 2'-O-methyluridine-3'-phosphate
  modified_base 19: mod_base = OTHER; note = 2'-O-methyluridine-3'-phosphate
  modified_base 20: mod_base = OTHER; note = 2'-O-methyluridine-3'-phosphate
  modified_base 21: mod_base = OTHER; note = 2'-O-methyladenosine
gagaaggacaaatacatttta

SEQ ID NO: 4159 - RNA, 21 nt, synthetic construct
  source 1..21: mol_type = other RNA
  modified_base 1: mod_base = OTHER; note = 2'-O-methyladenosine-3'-phosphate
  modified_base 2: mod_base = OTHER; note = 2'-O-methylguanosine-3'-phosphate
  modified_base 3: mod_base = OTHER; note = 2'-O-methyladenosine-3'-phosphate
  modified_base 4: mod_base = OTHER; note = 2'-O-methyladenosine-3'-phosphate
  modified_base 5: mod_base = OTHER; note = 2'-O-methylguanosine-3'-phosphate
  modified_base 6: mod_base = OTHER; note = 2'-O-methylguanosine-3'-phosphate
  modified_base 7: mod_base = OTHER; note = 2'-deoxy-2'-fluoroadenosine-3'-phosphate
  modified_base 8: mod_base = OTHER; note = 2'-O-methylcytidine-3'-phosphate
  modified_base 9: mod_base = OTHER; note = 2'-deoxy-2'-fluoroadenosine-3'-phosphate
  modified_base 10: mod_base = OTHER; note = 2'-deoxy-2'-fluoroadenosine-3'-phosphate
  modified_base 11: mod_base = OTHER; note = 2'-deoxy-2'-fluoroadenosine-3'-phosphate
  modified_base 12: mod_base = OTHER; note = 2'-O-methyluridine-3'-phosphate
  modified_base 13: mod_base = OTHER; note = 2'-O-methyladenosine-3'-phosphate
  modified_base 14: mod_base = OTHER; note = 2'-O-methylcytidine-3'-phosphate
  modified_base 15: mod_base = OTHER; note = 2'-O-methyladenosine-3'-phosphate
  modified_base 16: mod_base = OTHER; note = 2'-O-methyluridine-3'-phosphate
  modified_base 17: mod_base = OTHER; note = 2'-O-methyluridine-3'-phosphate
  modified_base 18: mod_base = OTHER; note = 2'-O-methyluridine-3'-phosphate
  modified_base 19: mod_base = OTHER; note = 2'-O-methyluridine-3'-phosphate
  modified_base 20: mod_base = OTHER; note = 2'-O-methyladenosine-3'-phosphate
  modified_base 21: mod_base = OTHER; note = 2'-O-methyladenosine
agaaggacaaatacattttaa

SEQ ID NO: 4160 - RNA, 21 nt, synthetic construct
  source 1..21: mol_type = other RNA
  modified_base 1: mod_base = OTHER; note = 2'-O-methylguanosine-3'-phosphate
  modified_base 2: mod_base = OTHER; note = 2'-O-methyladenosine-3'-phosphate
  modified_base 3: mod_base = OTHER; note = 2'-O-methyladenosine-3'-phosphate
  modified_base 4: mod_base = OTHER; note = 2'-O-methylguanosine-3'-phosphate
  modified_base 5: mod_base = OTHER; note = 2'-O-methylguanosine-3'-phosphate
  modified_base 6: mod_base = OTHER; note = 2'-O-methyladenosine-3'-phosphate
  modified_base 7: mod_base = OTHER; note = 2'-deoxy-2'-fluorocytidine-3'-phosphate
  modified_base 8: mod_base = OTHER; note = 2'-O-methyladenosine-3'-phosphate
  modified_base 9: mod_base = OTHER; note = 2'-deoxy-2'-fluoroadenosine-3'-phosphate
  modified_base 10: mod_base = OTHER; note = 2'-deoxy-2'-fluoroadenosine-3'-phosphate
  modified_base 11: mod_base = OTHER; note = 2'-deoxy-2'-fluorouridine-3'-phosphate
  modified_base 12: mod_base = OTHER; note = 2'-O-methyladenosine-3'-phosphate
  modified_base 13: mod_base = OTHER; note = 2'-O-methylcytidine-3'-phosphate
  modified_base 14: mod_base = OTHER; note = 2'-O-methyladenosine-3'-phosphate
  modified_base 15: mod_base = OTHER; note = 2'-O-methyluridine-3'-phosphate
  modified_base 16: mod_base = OTHER; note = 2'-O-methyluridine-3'-phosphate
  modified_base 17: mod_base = OTHER; note = 2'-O-methyluridine-3'-phosphate
  modified_base 18: mod_base = OTHER; note = 2'-O-methyluridine-3'-phosphate
  modified_base 19: mod_base = OTHER; note = 2'-O-methyladenosine-3'-phosphate
  modified_base 20: mod_base = OTHER; note = 2'-O-methylcytidine-3'-phosphate
  modified_base 21: mod_base = OTHER; note = 2'-O-methyladenosine
gaaggacaaatacattttaca

SEQ ID NO: 4161 - RNA, 21 nt, synthetic construct
  source 1..21: mol_type = other RNA
  modified_base 1: mod_base = OTHER; note = 2'-O-methyladenosine-3'-phosphate
  modified_base 2: mod_base = OTHER; note = 2'-O-methyladenosine-3'-phosphate
  modified_base 3: mod_base = OTHER; note = 2'-O-methylguanosine-3'-phosphate
  modified_base 4: mod_base = OTHER; note = 2'-O-methylguanosine-3'-phosphate
  modified_base 5: mod_base = OTHER; note = 2'-O-methyladenosine-3'-phosphate
  modified_base 6: mod_base = OTHER; note = 2'-O-methylcytidine-3'-phosphate
  modified_base 7: mod_base = OTHER; note = 2'-deoxy-2'-fluoroadenosine-3'-phosphate
  modified_base 8: mod_base = OTHER; note = 2'-O-methyladenosine-3'-phosphate
  modified_base 9: mod_base = OTHER; note = 2'-deoxy-2'-fluoroadenosine-3'-phosphate
  modified_base 10: mod_base = OTHER; note = 2'-deoxy-2'-fluorouridine-3'-phosphate
  modified_base 11: mod_base = OTHER; note = 2'-deoxy-2'-fluoroadenosine-3'-phosphate
  modified_base 12: mod_base = OTHER; note = 2'-O-methylcytidine-3'-phosphate
  modified_base 13: mod_base = OTHER; note = 2'-O-methyladenosine-3'-phosphate
  modified_base 14: mod_base = OTHER; note = 2'-O-methyluridine-3'-phosphate
  modified_base 15: mod_base = OTHER; note = 2'-O-methyluridine-3'-phosphate
  modified_base 16: mod_base = OTHER; note = 2'-O-methyluridine-3'-phosphate
  modified_base 17: mod_base = OTHER; note = 2'-O-methyluridine-3'-phosphate
  modified_base 18: mod_base = OTHER; note = 2'-O-methyladenosine-3'-phosphate
  modified_base 19: mod_base = OTHER; note = 2'-O-methylcytidine-3'-phosphate
  modified_base 20: mod_base = OTHER; note = 2'-O-methyladenosine-3'-phosphate
  modified_base 21: mod_base = OTHER; note = 2'-O-methyladenosine
aaggacaaatacattttacaa

SEQ ID NO: 4162 - RNA, 21 nt, synthetic construct
  source 1..21: mol_type = other RNA
  modified_base 1: mod_base = OTHER; note = 2'-O-methyladenosine-3'-phosphate
  modified_base 2: mod_base = OTHER; note = 2'-O-methylguanosine-3'-phosphate
  modified_base 3: mod_base = OTHER; note = 2'-O-methylguanosine-3'-phosphate
  modified_base 4: mod_base = OTHER; note = 2'-O-methyladenosine-3'-phosphate
  modified_base 5: mod_base = OTHER; note = 2'-O-methylcytidine-3'-phosphate
  modified_base 6: mod_base = OTHER; note = 2'-O-methyladenosine-3'-phosphate
  modified_base 7: mod_base = OTHER; note = 2'-deoxy-2'-fluoroadenosine-3'-phosphate
  modified_base 8: mod_base = OTHER; note = 2'-O-methyladenosine-3'-phosphate
  modified_base 9: mod_base = OTHER; note = 2'-deoxy-2'-fluorouridine-3'-phosphate
  modified_base 10: mod_base = OTHER; note = 2'-deoxy-2'-fluoroadenosine-3'-phosphate
  modified_base 11: mod_base = OTHER; note = 2'-deoxy-2'-fluorocytidine-3'-phosphate
  modified_base 12: mod_base = OTHER; note = 2'-O-methyladenosine-3'-phosphate
  modified_base 13: mod_base = OTHER; note = 2'-O-methyluridine-3'-phosphate
  modified_base 14: mod_base = OTHER; note = 2'-O-methyluridine-3'-phosphate
  modified_base 15: mod_base = OTHER; note = 2'-O-methyluridine-3'-phosphate
  modified_base 16: mod_base = OTHER; note = 2'-O-methyluridine-3'-phosphate
  modified_base 17: mod_base = OTHER; note = 2'-O-methyladenosine-3'-phosphate
  modified_base 18: mod_base = OTHER; note = 2'-O-methylcytidine-3'-phosphate
  modified_base 19: mod_base = OTHER; note = 2'-O-methyladenosine-3'-phosphate
  modified_base 20: mod_base = OTHER; note = 2'-O-methyladenosine-3'-phosphate
  modified_base 21: mod_base = OTHER; note = 2'-O-methyladenosine
aggacaaatacattttacaaa

SEQ ID NO: 4163 - RNA, 21 nt, synthetic construct
  source 1..21: mol_type = other RNA
  modified_base 1: mod_base = OTHER; note = 2'-O-methylguanosine-3'-phosphate
  modified_base 2: mod_base = OTHER; note = 2'-O-methylguanosine-3'-phosphate
  modified_base 3: mod_base = OTHER; note = 2'-O-methyladenosine-3'-phosphate
  modified_base 4: mod_base = OTHER; note = 2'-O-methylcytidine-3'-phosphate
  modified_base 5: mod_base = OTHER; note = 2'-O-methyladenosine-3'-phosphate
  modified_base 6: mod_base = OTHER; note = 2'-O-methyladenosine-3'-phosphate
  modified_base 7: mod_base = OTHER; note = 2'-deoxy-2'-fluoroadenosine-3'-phosphate
  modified_base 8: mod_base = OTHER; note = 2'-O-methyluridine-3'-phosphate
  modified_base 9: mod_base = OTHER; note = 2'-deoxy-2'-fluoroadenosine-3'-phosphate
  modified_base 10: mod_base = OTHER; note = 2'-deoxy-2'-fluorocytidine-3'-phosphate
  modified_base 11: mod_base = OTHER; note = 2'-deoxy-2'-fluoroadenosine-3'-phosphate
  modified_base 12: mod_base = OTHER; note = 2'-O-methyluridine-3'-phosphate
  modified_base 13: mod_base = OTHER; note = 2'-O-methyluridine-3'-phosphate
  modified_base 14: mod_base = OTHER; note = 2'-O-methyluridine-3'-phosphate
  modified_base 15: mod_base = OTHER; note = 2'-O-methyluridine-3'-phosphate
  modified_base 16: mod_base = OTHER; note = 2'-O-methyladenosine-3'-phosphate
  modified_base 17: mod_base = OTHER; note = 2'-O-methylcytidine-3'-phosphate
  modified_base 18: mod_base = OTHER; note = 2'-O-methyladenosine-3'-phosphate
  modified_base 19: mod_base = OTHER; note = 2'-O-methyladenosine-3'-phosphate
  modified_base 20: mod_base = OTHER; note = 2'-O-methylguanosine-3'-phosphate
  modified_base 21: mod_base = OTHER; note = 2'-O-methyladenosine
ggacaaatacattttacaaga

SEQ ID NO: 4164 - RNA, 21 nt, synthetic construct
  source 1..21: mol_type = other RNA
  modified_base 1: mod_base = OTHER; note = 2'-O-methylguanosine-3'-phosphate
  modified_base 2: mod_base = OTHER; note = 2'-O-methyladenosine-3'-phosphate
  modified_base 3: mod_base = OTHER; note = 2'-O-methylcytidine-3'-phosphate
  modified_base 4: mod_base = OTHER; note = 2'-O-methyladenosine-3'-phosphate
  modified_base 5: mod_base = OTHER; note = 2'-O-methyladenosine-3'-phosphate
  modified_base 6: mod_base = OTHER; note = 2'-O-methyladenosine-3'-phosphate
  modified_base 7: mod_base = OTHER; note = 2'-deoxy-2'-fluorouridine-3'-phosphate
  modified_base 8: mod_base = OTHER; note = 2'-O-methyladenosine-3'-phosphate
  modified_base 9: mod_base = OTHER; note = 2'-deoxy-2'-fluorocytidine-3'-phosphate
  modified_base 10: mod_base = OTHER; note = 2'-deoxy-2'-fluoroadenosine-3'-phosphate
  modified_base 11: mod_base = OTHER; note = 2'-deoxy-2'-fluorouridine-3'-phosphate
  modified_base 12: mod_base = OTHER; note = 2'-O-methyluridine-3'-phosphate
  modified_base 13: mod_base = OTHER; note = 2'-O-methyluridine-3'-phosphate
  modified_base 14: mod_base = OTHER; note = 2'-O-methyluridine-3'-phosphate
  modified_base 15: mod_base = OTHER; note = 2'-O-methyladenosine-3'-phosphate
  modified_base 16: mod_base = OTHER; note = 2'-O-methylcytidine-3'-phosphate
  modified_base 17: mod_base = OTHER; note = 2'-O-methyladenosine-3'-phosphate
  modified_base 18: mod_base = OTHER; note = 2'-O-methyladenosine-3'-phosphate
  modified_base 19: mod_base = OTHER; note = 2'-O-methylguanosine-3'-phosphate
  modified_base 20: mod_base = OTHER; note = 2'-O-methylguanosine-3'-phosphate
  modified_base 21: mod_base = OTHER; note = 2'-O-methyladenosine
gacaaatacattttacaagga

SEQ ID NO: 4165 - RNA, 21 nt, synthetic construct
  source 1..21: mol_type = other RNA
  modified_base 1: mod_base = OTHER; note = 2'-O-methyladenosine-3'-phosphate
  modified_base 2: mod_base = OTHER; note = 2'-O-methylcytidine-3'-phosphate
  modified_base 3: mod_base = OTHER; note = 2'-O-methyladenosine-3'-phosphate
  modified_base 4: mod_base = OTHER; note = 2'-O-methyladenosine-3'-phosphate
  modified_base 5: mod_base = OTHER; note = 2'-O-methyladenosine-3'-phosphate
  modified_base 6: mod_base = OTHER; note = 2'-O-methyluridine-3'-phosphate
  modified_base 7: mod_base = OTHER; note = 2'-deoxy-2'-fluoroadenosine-3'-phosphate
  modified_base 8: mod_base = OTHER; note = 2'-O-methylcytidine-3'-phosphate
  modified_base 9: mod_base = OTHER; note = 2'-deoxy-2'-fluoroadenosine-3'-phosphate
  modified_base 10: mod_base = OTHER; note = 2'-deoxy-2'-fluorouridine-3'-phosphate
  modified_base 11: mod_base = OTHER; note = 2'-deoxy-2'-fluorouridine-3'-phosphate
  modified_base 12: mod_base = OTHER; note = 2'-O-methyluridine-3'-phosphate
  modified_base 13: mod_base = OTHER; note = 2'-O-methyluridine-3'-phosphate
  modified_base 14: mod_base = OTHER; note = 2'-O-methyladenosine-3'-phosphate
  modified_base 15: mod_base = OTHER; note = 2'-O-methylcytidine-3'-phosphate
  modified_base 16: mod_base = OTHER; note = 2'-O-methyladenosine-3'-phosphate
  modified_base 17: mod_base = OTHER; note = 2'-O-methyladenosine-3'-phosphate
  modified_base 18: mod_base = OTHER; note = 2'-O-methylguanosine-3'-phosphate
  modified_base 19: mod_base = OTHER; note = 2'-O-methylguanosine-3'-phosphate
  modified_base 20: mod_base = OTHER; note = 2'-O-methyladenosine-3'-phosphate
  modified_base 21: mod_base = OTHER; note = 2'-O-methyladenosine
acaaatacattttacaaggaa

SEQ ID NO: 4166 - RNA, 21 nt, synthetic construct
  source 1..21: mol_type = other RNA
  modified_base 1: mod_base = OTHER; note = 2'-O-methyladenosine-3'-phosphate
  modified_base 2: mod_base = OTHER; note = 2'-O-methyladenosine-3'-phosphate
  modified_base 3: mod_base = OTHER; note = 2'-O-methyluridine-3'-phosphate
  modified_base 4: mod_base = OTHER; note = 2'-O-methyladenosine-3'-phosphate
  modified_base 5: mod_base = OTHER; note = 2'-O-methyladenosine-3'-phosphate
  modified_base 6: mod_base = OTHER; note = 2'-O-methylguanosine-3'-phosphate
  modified_base 7: mod_base = OTHER; note = 2'-deoxy-2'-fluorocytidine-3'-phosphate
  modified_base 8: mod_base = OTHER; note = 2'-O-methylcytidine-3'-phosphate
  modified_base 9: mod_base = OTHER; note = 2'-deoxy-2'-fluorouridine-3'-phosphate
  modified_base 10: mod_base = OTHER; note = 2'-deoxy-2'-fluoroguanosine-3'-phosphate
  modified_base 11: mod_base = OTHER; note = 2'-deoxy-2'-fluoroguanosine-3'-phosphate
  modified_base 12: mod_base = OTHER; note = 2'-O-methyluridine-3'-phosphate
  modified_base 13: mod_base = OTHER; note = 2'-O-methylguanosine-3'-phosphate
  modified_base 14: mod_base = OTHER; note = 2'-O-methyluridine-3'-phosphate
  modified_base 15: mod_base = OTHER; note = 2'-O-methylcytidine-3'-phosphate
  modified_base 16: mod_base = OTHER; note = 2'-O-methyluridine-3'-phosphate
  modified_base 17: mod_base = OTHER; note = 2'-O-methyladenosine-3'-phosphate
  modified_base 18: mod_base = OTHER; note = 2'-O-methyluridine-3'-phosphate
  modified_base 19: mod_base = OTHER; note = 2'-O-methylguanosine-3'-phosphate
  modified_base 20: mod_base = OTHER; note = 2'-O-methyluridine-3'-phosphate
  modified_base 21: mod_base = OTHER; note = 2'-O-methyladenosine
aataagcctggtgtctatgta

SEQ ID NO: 4167 - RNA, 21 nt, synthetic construct
  source 1..21: mol_type = other RNA
  modified_base 1: mod_base = OTHER; note = 2'-O-methyladenosine-3'-phosphate
  modified_base 2: mod_base = OTHER; note = 2'-O-methyluridine-3'-phosphate
  modified_base 3: mod_base = OTHER; note = 2'-O-methyladenosine-3'-phosphate
  modified_base 4: mod_base = OTHER; note = 2'-O-methyladenosine-3'-phosphate
  modified_base 5: mod_base = OTHER; note = 2'-O-methylguanosine-3'-phosphate
  modified_base 6: mod_base = OTHER; note = 2'-O-methylcytidine-3'-phosphate
  modified_base 7: mod_base = OTHER; note = 2'-deoxy-2'-fluorocytidine-3'-phosphate
  modified_base 8: mod_base = OTHER; note = 2'-O-methyluridine-3'-phosphate
  modified_base 9: mod_base = OTHER; note = 2'-deoxy-2'-fluoroguanosine-3'-phosphate
  modified_base 10: mod_base = OTHER; note = 2'-deoxy-2'-fluoroguanosine-3'-phosphate
  modified_base 11: mod_base = OTHER; note = 2'-deoxy-2'-fluorouridine-3'-phosphate
  modified_base 12: mod_base = OTHER; note = 2'-O-methylguanosine-3'-phosphate
  modified_base 13: mod_base = OTHER; note = 2'-O-methyluridine-3'-phosphate
  modified_base 14: mod_base = OTHER; note = 2'-O-methylcytidine-3'-phosphate
  modified_base 15: mod_base = OTHER; note = 2'-O-methyluridine-3'-phosphate
  modified_base 16: mod_base = OTHER; note = 2'-O-methyladenosine-3'-phosphate
  modified_base 17: mod_base = OTHER; note = 2'-O-methyluridine-3'-phosphate
  modified_base 18: mod_base = OTHER; note = 2'-O-methylguanosine-3'-phosphate
  modified_base 19: mod_base = OTHER; note = 2'-O-methyluridine-3'-phosphate
  modified_base 20: mod_base = OTHER; note = 2'-O-methyluridine-3'-phosphate
  modified_base 21: mod_base = OTHER; note = 2'-O-methyladenosine
ataagcctggtgtctatgtta

SEQ ID NO: 4168 - RNA, 21 nt, synthetic construct
  source 1..21: mol_type = other RNA
  modified_base 1: mod_base = OTHER; note = 2'-O-methyluridine-3'-phosphate
  modified_base 2: mod_base = OTHER; note = 2'-O-methyladenosine-3'-phosphate
  modified_base 3: mod_base = OTHER; note = 2'-O-methyladenosine-3'-phosphate
  modified_base 4: mod_base = OTHER; note = 2'-O-methylguanosine-3'-phosphate
  modified_base 5: mod_base = OTHER; note = 2'-O-methylcytidine-3'-phosphate
  modified_base 6: mod_base = OTHER; note = 2'-O-methylcytidine-3'-phosphate
  modified_base 7: mod_base = OTHER; note = 2'-deoxy-2'-fluorouridine-3'-phosphate
  modified_base 8: mod_base = OTHER; note = 2'-O-methylguanosine-3'-phosphate
  modified_base 9: mod_base = OTHER; note = 2'-deoxy-2'-fluoroguanosine-3'-phosphate
  modified_base 10: mod_base = OTHER; note = 2'-deoxy-2'-fluorouridine-3'-phosphate
  modified_base 11: mod_base = OTHER; note = 2'-deoxy-2'-fluoroguanosine-3'-phosphate
  modified_base 12: mod_base = OTHER; note = 2'-O-methyluridine-3'-phosphate
  modified_base 13: mod_base = OTHER; note = 2'-O-methylcytidine-3'-phosphate
  modified_base 14: mod_base = OTHER; note = 2'-O-methyluridine-3'-phosphate
  modified_base 15: mod_base = OTHER; note = 2'-O-methyladenosine-3'-phosphate
  modified_base 16: mod_base = OTHER; note = 2'-O-methyluridine-3'-phosphate
  modified_base 17: mod_base = OTHER; note = 2'-O-methylguanosine-3'-phosphate
  modified_base 18: mod_base = OTHER; note = 2'-O-methyluridine-3'-phosphate
  modified_base 19: mod_base = OTHER; note = 2'-O-methyluridine-3'-phosphate
  modified_base 20: mod_base = OTHER; note = 2'-O-methylcytidine-3'-phosphate
  modified_base 21: mod_base = OTHER; note = 2'-O-methyladenosine
taagcctggtgtctatgttca

SEQ ID NO: 4169 - RNA, 21 nt, synthetic construct
  source 1..21: mol_type = other RNA
  modified_base 1: mod_base = OTHER; note = 2'-O-methyladenosine-3'-phosphate
  modified_base 2: mod_base = OTHER; note = 2'-O-methylguanosine-3'-phosphate
  modified_base 3: mod_base = OTHER; note = 2'-O-methylcytidine-3'-phosphate
  modified_base 4: mod_base = OTHER; note = 2'-O-methylcytidine-3'-phosphate
  modified_base 5: mod_base = OTHER; note = 2'-O-methyluridine-3'-phosphate
  modified_base 6: mod_base = OTHER; note = 2'-O-methylguanosine-3'-phosphate
  modified_base 7: mod_base = OTHER; note = 2'-deoxy-2'-fluoroguanosine-3'-phosphate
  modified_base 8: mod_base = OTHER; note = 2'-O-methyluridine-3'-phosphate
  modified_base 9: mod_base = OTHER; note = 2'-deoxy-2'-fluoroguanosine-3'-phosphate
  modified_base 10: mod_base = OTHER; note = 2'-deoxy-2'-fluorouridine-3'-phosphate
  modified_base 11: mod_base = OTHER; note = 2'-deoxy-2'-fluorocytidine-3'-phosphate
  modified_base 12: mod_base = OTHER; note = 2'-O-methyluridine-3'-phosphate
  modified_base 13: mod_base = OTHER; note = 2'-O-methyladenosine-3'-phosphate
  modified_base 14: mod_base = OTHER; note = 2'-O-methyluridine-3'-phosphate
  modified_base 15: mod_base = OTHER; note = 2'-O-methylguanosine-3'-phosphate
  modified_base 16: mod_base = OTHER; note = 2'-O-methyluridine-3'-phosphate
  modified_base 17: mod_base = OTHER; note = 2'-O-methyluridine-3'-phosphate
  modified_base 18: mod_base = OTHER; note = 2'-O-methylcytidine-3'-phosphate
  modified_base 19: mod_base = OTHER; note = 2'-O-methylguanosine-3'-phosphate
  modified_base 20: mod_base = OTHER; note = 2'-O-methyluridine-3'-phosphate
  modified_base 21: mod_base = OTHER; note = 2'-O-methyladenosine
agcctggtgtctatgttcgta

SEQ ID NO: 4170 - RNA, 21 nt, synthetic construct
  source 1..21: mol_type = other RNA
  modified_base 1: mod_base = OTHER; note = 2'-O-methylcytidine-3'-phosphate
  modified_base 2: mod_base = OTHER; note = 2'-O-methylcytidine-3'-phosphate
  modified_base 3: mod_base = OTHER; note = 2'-O-methyluridine-3'-phosphate
  modified_base 4: mod_base = OTHER; note = 2'-O-methylguanosine-3'-phosphate
  modified_base 5: mod_base = OTHER; note = 2'-O-methylguanosine-3'-phosphate
  modified_base 6: mod_base = OTHER; note = 2'-O-methyluridine-3'-phosphate
  modified_base 7: mod_base = OTHER; note = 2'-deoxy-2'-fluoroguanosine-3'-phosphate
  modified_base 8: mod_base = OTHER; note = 2'-O-methyluridine-3'-phosphate
  modified_base 9: mod_base = OTHER; note = 2'-deoxy-2'-fluorocytidine-3'-phosphate
  modified_base 10: mod_base = OTHER; note = 2'-deoxy-2'-fluorouridine-3'-phosphate
  modified_base 11: mod_base = OTHER; note = 2'-deoxy-2'-fluoroadenosine-3'-phosphate
  modified_base 12: mod_base = OTHER; note = 2'-O-methyluridine-3'-phosphate
  modified_base 13: mod_base = OTHER; note = 2'-O-methylguanosine-3'-phosphate
  modified_base 14: mod_base = OTHER; note = 2'-O-methyluridine-3'-phosphate
  modified_base 15: mod_base = OTHER; note = 2'-O-methyluridine-3'-phosphate
  modified_base 16: mod_base = OTHER; note = 2'-O-methylcytidine-3'-phosphate
  modified_base 17: mod_base = OTHER; note = 2'-O-methylguanosine-3'-phosphate
  modified_base 18: mod_base = OTHER; note = 2'-O-methyluridine-3'-phosphate
  modified_base 19: mod_base = OTHER; note = 2'-O-methylguanosine-3'-phosphate
  modified_base 20: mod_base = OTHER; note = 2'-O-methyluridine-3'-phosphate
  modified_base 21: mod_base = OTHER; note = 2'-O-methyladenosine
cctggtgtctatgttcgtgta

SEQ ID NO: 4171 - RNA, 21 nt, synthetic construct
  source 1..21: mol_type = other RNA
  modified_base 1: mod_base = OTHER; note = 2'-O-methylcytidine-3'-phosphate
  modified_base 2: mod_base = OTHER; note = 2'-O-methyluridine-3'-phosphate
  modified_base 3: mod_base = OTHER; note = 2'-O-methylguanosine-3'-phosphate
  modified_base 4: mod_base = OTHER; note = 2'-O-methylguanosine-3'-phosphate
  modified_base 5: mod_base = OTHER; note = 2'-O-methyluridine-3'-phosphate
  modified_base 6: mod_base = OTHER; note = 2'-O-methylguanosine-3'-phosphate
  modified_base 7: mod_base = OTHER; note = 2'-deoxy-2'-fluorouridine-3'-phosphate
  modified_base 8: mod_base = OTHER; note = 2'-O-methylcytidine-3'-phosphate
  modified_base 9: mod_base = OTHER; note = 2'-deoxy-2'-fluorouridine-3'-phosphate
  modified_base 10: mod_base = OTHER; note = 2'-deoxy-2'-fluoroadenosine-3'-phosphate
  modified_base 11: mod_base = OTHER; note = 2'-deoxy-2'-fluorouridine-3'-phosphate
  modified_base 12: mod_base = OTHER; note = 2'-O-methylguanosine-3'-phosphate
  modified_base 13: mod_base = OTHER; note = 2'-O-methyluridine-3'-phosphate
  modified_base 14: mod_base = OTHER; note = 2'-O-methyluridine-3'-phosphate
  modified_base 15: mod_base = OTHER; note = 2'-O-methylcytidine-3'-phosphate
  modified_base 16: mod_base = OTHER; note = 2'-O-methylguanosine-3'-phosphate
  modified_base 17: mod_base = OTHER; note = 2'-O-methyluridine-3'-phosphate
  modified_base 18: mod_base = OTHER; note = 2'-O-methylguanosine-3'-phosphate
  modified_base 19: mod_base = OTHER; note = 2'-O-methyluridine-3'-phosphate
  modified_base 20: mod_base = OTHER; note = 2'-O-methyluridine-3'-phosphate
  modified_base 21: mod_base = OTHER; note = 2'-O-methyladenosine
ctggtgtctatgttcgtgtta

SEQ ID NO: 4172 - RNA, 21 nt, synthetic construct
  source 1..21: mol_type = other RNA
  modified_base 1: mod_base = OTHER; note = 2'-O-methyluridine-3'-phosphate
  modified_base 2: mod_base = OTHER; note = 2'-O-methylguanosine-3'-phosphate
  modified_base 3: mod_base = OTHER; note = 2'-O-methylguanosine-3'-phosphate
  modified_base 4: mod_base = OTHER; note = 2'-O-methyluridine-3'-phosphate
  modified_base 5: mod_base = OTHER; note = 2'-O-methylguanosine-3'-phosphate
  modified_base 6: mod_base = OTHER; note = 2'-O-methyluridine-3'-phosphate
  modified_base 7: mod_base = OTHER; note = 2'-deoxy-2'-fluorocytidine-3'-phosphate
  modified_base 8: mod_base = OTHER; note = 2'-O-methyluridine-3'-phosphate
  modified_base 9: mod_base = OTHER; note = 2'-deoxy-2'-fluoroadenosine-3'-phosphate
  modified_base 10: mod_base = OTHER; note = 2'-deoxy-2'-fluorouridine-3'-phosphate
  modified_base 11: mod_base = OTHER; note = 2'-deoxy-2'-fluoroguanosine-3'-phosphate
  modified_base 12: mod_base = OTHER; note = 2'-O-methyluridine-3'-phosphate
  modified_base 13: mod_base = OTHER; note = 2'-O-methyluridine-3'-phosphate
  modified_base 14: mod_base = OTHER; note = 2'-O-methylcytidine-3'-phosphate
  modified_base 15: mod_base = OTHER; note = 2'-O-methylguanosine-3'-phosphate
  modified_base 16: mod_base = OTHER; note = 2'-O-methyluridine-3'-phosphate
  modified_base 17: mod_base = OTHER; note = 2'-O-methylguanosine-3'-phosphate
  modified_base 18: mod_base = OTHER; note = 2'-O-methyluridine-3'-phosphate
  modified_base 19: mod_base = OTHER; note = 2'-O-methyluridine-3'-phosphate
  modified_base 20: mod_base = OTHER; note = 2'-O-methyluridine-3'-phosphate
  modified_base 21: mod_base = OTHER; note = 2'-O-methyladenosine
tggtgtctatgttcgtgttta

SEQ ID NO: 4173 - RNA, 21 nt, synthetic construct
  source 1..21: mol_type = other RNA
  modified_base 1: mod_base = OTHER; note = 2'-O-methylguanosine-3'-phosphate
  modified_base 2: mod_base = OTHER; note = 2'-O-methylguanosine-3'-phosphate
  modified_base 3: mod_base = OTHER; note = 2'-O-methyluridine-3'-phosphate
  modified_base 4: mod_base = OTHER; note = 2'-O-methylguanosine-3'-phosphate
  modified_base 5: mod_base = OTHER; note = 2'-O-methyluridine-3'-phosphate
  modified_base 6: mod_base = OTHER; note = 2'-O-methylcytidine-3'-phosphate
  modified_base 7: mod_base = OTHER; note = 2'-deoxy-2'-fluorouridine-3'-phosphate
  modified_base 8: mod_base = OTHER; note = 2'-O-methyladenosine-3'-phosphate
  modified_base 9: mod_base = OTHER; note = 2'-deoxy-2'-fluorouridine-3'-phosphate
  modified_base 10: mod_base = OTHER; note = 2'-deoxy-2'-fluoroguanosine-3'-phosphate
  modified_base 11: mod_base = OTHER; note = 2'-deoxy-2'-fluorouridine-3'-phosphate
  modified_base 12: mod_base = OTHER; note = 2'-O-methyluridine-3'-phosphate
  modified_base 13: mod_base = OTHER; note = 2'-O-methylcytidine-3'-phosphate
  modified_base 14: mod_base = OTHER; note = 2'-O-methylguanosine-3'-phosphate
  modified_base 15: mod_base = OTHER; note = 2'-O-methyluridine-3'-phosphate
  modified_base 16: mod_base = OTHER; note = 2'-O-methylguanosine-3'-phosphate
  modified_base 17: mod_base = OTHER; note = 2'-O-methyluridine-3'-phosphate
  modified_base 18: mod_base = OTHER; note = 2'-O-methyluridine-3'-phosphate
  modified_base 19: mod_base = OTHER; note = 2'-O-methyluridine-3'-phosphate
  modified_base 20: mod_base = OTHER; note = 2'-O-methylcytidine-3'-phosphate
  modified_base 21: mod_base = OTHER; note = 2'-O-methyladenosine
ggtgtctatgttcgtgtttca

SEQ ID NO: 4174 - RNA, 21 nt, synthetic construct
  source 1..21: mol_type = other RNA
  modified_base 1: mod_base = OTHER; note = 2'-O-methylguanosine-3'-phosphate
  modified_base 2: mod_base = OTHER; note = 2'-O-methyluridine-3'-phosphate
  modified_base 3: mod_base = OTHER; note = 2'-O-methylguanosine-3'-phosphate
  modified_base 4: mod_base = OTHER; note = 2'-O-methyluridine-3'-phosphate
  modified_base 5: mod_base = OTHER; note = 2'-O-methylcytidine-3'-phosphate
  modified_base 6: mod_base = OTHER; note = 2'-O-methyluridine-3'-phosphate
  modified_base 7: mod_base = OTHER; note = 2'-deoxy-2'-fluoroadenosine-3'-phosphate
  modified_base 8: mod_base = OTHER; note = 2'-O-methyluridine-3'-phosphate
  modified_base 9: mod_base = OTHER; note = 2'-deoxy-2'-fluoroguanosine-3'-phosphate
  modified_base 10: mod_base = OTHER; note = 2'-deoxy-2'-fluorouridine-3'-phosphate
  modified_base 11: mod_base = OTHER; note = 2'-deoxy-2'-fluorouridine-3'-phosphate
  modified_base 12: mod_base = OTHER; note = 2'-O-methylcytidine-3'-phosphate
  modified_base 13: mod_base = OTHER; note = 2'-O-methylguanosine-3'-phosphate
  modified_base 14: mod_base = OTHER; note = 2'-O-methyluridine-3'-phosphate
  modified_base 15: mod_base = OTHER; note = 2'-O-methylguanosine-3'-phosphate
  modified_base 16: mod_base = OTHER; note = 2'-O-methyluridine-3'-phosphate
  modified_base 17: mod_base = OTHER; note = 2'-O-methyluridine-3'-phosphate
  modified_base 18: mod_base = OTHER; note = 2'-O-methyluridine-3'-phosphate
  modified_base 19: mod_base = OTHER; note = 2'-O-methylcytidine-3'-phosphate
  modified_base 20: mod_base = OTHER; note = 2'-O-methyladenosine-3'-phosphate
  modified_base 21: mod_base = OTHER; note = 2'-O-methyladenosine
gtgtctatgttcgtgtttcaa

SEQ ID NO: 4175 - RNA, 21 nt, synthetic construct
  source 1..21: mol_type = other RNA
  modified_base 1: mod_base = OTHER; note = 2'-O-methyluridine-3'-phosphate
  modified_base 2: mod_base = OTHER; note = 2'-O-methylguanosine-3'-phosphate
  modified_base 3: mod_base = OTHER; note = 2'-O-methyluridine-3'-phosphate
  modified_base 4: mod_base = OTHER; note = 2'-O-methylcytidine-3'-phosphate
  modified_base 5: mod_base = OTHER; note = 2'-O-methyluridine-3'-phosphate
  modified_base 6: mod_base = OTHER; note = 2'-O-methyladenosine-3'-phosphate
  modified_base 7: mod_base = OTHER; note = 2'-deoxy-2'-fluorouridine-3'-phosphate
  modified_base 8: mod_base = OTHER; note = 2'-O-methylguanosine-3'-phosphate
  modified_base 9: mod_base = OTHER; note = 2'-deoxy-2'-fluorouridine-3'-phosphate
  modified_base 10: mod_base = OTHER; note = 2'-deoxy-2'-fluorouridine-3'-phosphate
  modified_base 11: mod_base = OTHER; note = 2'-deoxy-2'-fluorocytidine-3'-phosphate
  modified_base 12: mod_base = OTHER; note = 2'-O-methylguanosine-3'-phosphate
  modified_base 13: mod_base = OTHER; note = 2'-O-methyluridine-3'-phosphate
  modified_base 14: mod_base = OTHER; note = 2'-O-methylguanosine-3'-phosphate
  modified_base 15: mod_base = OTHER; note = 2'-O-methyluridine-3'-phosphate
  modified_base 16: mod_base = OTHER; note = 2'-O-methyluridine-3'-phosphate
  modified_base 17: mod_base = OTHER; note = 2'-O-methyluridine-3'-phosphate
  modified_base 18: mod_base = OTHER; note = 2'-O-methylcytidine-3'-phosphate
  modified_base 19: mod_base = OTHER; note = 2'-O-methyladenosine-3'-phosphate
  modified_base 20: mod_base = OTHER; note = 2'-O-methyladenosine-3'-phosphate
  modified_base 21: mod_base = OTHER; note = 2'-O-methyladenosine
tgtctatgttcgtgtttcaaa

SEQ ID NO: 4176 - RNA, 21 nt, synthetic construct
  source 1..21: mol_type = other RNA
  modified_base 1: mod_base = OTHER; note = 2'-O-methylguanosine-3'-phosphate
  modified_base 2: mod_base = OTHER; note = 2'-O-methyluridine-3'-phosphate
  modified_base 3: mod_base = OTHER; note = 2'-O-methylcytidine-3'-phosphate
  modified_base 4: mod_base = OTHER; note = 2'-O-methyluridine-3'-phosphate
  modified_base 5: mod_base = OTHER; note = 2'-O-methyladenosine-3'-phosphate
  modified_base 6: mod_base = OTHER; note = 2'-O-methyluridine-3'-phosphate
  modified_base 7: mod_base = OTHER; note = 2'-deoxy-2'-fluoroguanosine-3'-phosphate
  modified_base 8: mod_base = OTHER; note = 2'-O-methyluridine-3'-phosphate
  modified_base 9: mod_base = OTHER; note = 2'-deoxy-2'-fluorouridine-3'-phosphate
  modified_base 10: mod_base = OTHER; note = 2'-deoxy-2'-fluorocytidine-3'-phosphate
  modified_base 11: mod_base = OTHER; note = 2'-deoxy-2'-fluoroguanosine-3'-phosphate
  modified_base 12: mod_base = OTHER; note = 2'-O-methyluridine-3'-phosphate
  modified_base 13: mod_base = OTHER; note = 2'-O-methylguanosine-3'-phosphate
  modified_base 14: mod_base = OTHER; note = 2'-O-methyluridine-3'-phosphate
  modified_base 15: mod_base = OTHER; note = 2'-O-methyluridine-3'-phosphate
  modified_base 16: mod_base = OTHER; note = 2'-O-methyluridine-3'-phosphate
  modified_base 17: mod_base = OTHER; note = 2'-O-methylcytidine-3'-phosphate
  modified_base 18: mod_base = OTHER; note = 2'-O-methyladenosine-3'-phosphate
  modified_base 19: mod_base = OTHER; note = 2'-O-methyladenosine-3'-phosphate
  modified_base 20: mod_base = OTHER; note = 2'-O-methylguanosine-3'-phosphate
  modified_base 21: mod_base = OTHER; note = 2'-O-methyladenosine
gtctatgttcgtgtttcaaga

SEQ ID NO: 4177 - RNA, 21 nt, synthetic construct
  source 1..21: mol_type = other RNA
  modified_base 1: mod_base = OTHER; note = 2'-O-methyluridine-3'-phosphate
  modified_base 2: mod_base = OTHER; note = 2'-O-methylcytidine-3'-phosphate
  modified_base 3: mod_base = OTHER; note = 2'-O-methyluridine-3'-phosphate
  modified_base 4: mod_base = OTHER; note = 2'-O-methyladenosine-3'-phosphate
  modified_base 5: mod_base = OTHER; note = 2'-O-methyluridine-3'-phosphate
  modified_base 6: mod_base = OTHER; note = 2'-O-methylguanosine-3'-phosphate
  modified_base 7: mod_base = OTHER; note = 2'-deoxy-2'-fluorouridine-3'-phosphate
  modified_base 8: mod_base = OTHER; note = 2'-O-methyluridine-3'-phosphate
  modified_base 9: mod_base = OTHER; note = 2'-deoxy-2'-fluorocytidine-3'-phosphate
  modified_base 10: mod_base = OTHER; note = 2'-deoxy-2'-fluoroguanosine-3'-phosphate
  modified_base 11: mod_base = OTHER; note = 2'-deoxy-2'-fluorouridine-3'-phosphate
  modified_base 12: mod_base = OTHER; note = 2'-O-methylguanosine-3'-phosphate
  modified_base 13: mod_base = OTHER; note = 2'-O-methyluridine-3'-phosphate
  modified_base 14: mod_base = OTHER; note = 2'-O-methyluridine-3'-phosphate
  modified_base 15: mod_base = OTHER; note = 2'-O-methyluridine-3'-phosphate
  modified_base 16: mod_base = OTHER; note = 2'-O-methylcytidine-3'-phosphate
  modified_base 17: mod_base = OTHER; note = 2'-O-methyladenosine-3'-phosphate
  modified_base 18: mod_base = OTHER; note = 2'-O-methyladenosine-3'-phosphate
  modified_base 19: mod_base = OTHER; note = 2'-O-methylguanosine-3'-phosphate
  modified_base 20: mod_base = OTHER; note = 2'-O-methylguanosine-3'-phosphate
  modified_base 21: mod_base = OTHER; note = 2'-O-methyladenosine
tctatgttcgtgtttcaagga

SEQ ID NO: 4178 - RNA, 21 nt, synthetic construct
  source 1..21: mol_type = other RNA
  modified_base 1: mod_base = OTHER; note = 2'-O-methylcytidine-3'-phosphate
  modified_base 2: mod_base = OTHER; note = 2'-O-methyluridine-3'-phosphate
  modified_base 3: mod_base = OTHER; note = 2'-O-methyladenosine-3'-phosphate
  modified_base 4: mod_base = OTHER; note = 2'-O-methyluridine-3'-phosphate
  modified_base 5: mod_base = OTHER; note = 2'-O-methylguanosine-3'-phosphate
  modified_base 6: mod_base = OTHER; note = 2'-O-methyluridine-3'-phosphate
  modified_base 7: mod_base = OTHER; note = 2'-deoxy-2'-fluorouridine-3'-phosphate
  modified_base 8: mod_base = OTHER; note = 2'-O-methylcytidine-3'-phosphate
  modified_base 9: mod_base = OTHER; note = 2'-deoxy-2'-fluoroguanosine-3'-phosphate
  modified_base 10: mod_base = OTHER; note = 2'-deoxy-2'-fluorouridine-3'-phosphate
  modified_base 11: mod_base = OTHER; note = 2'-deoxy-2'-fluoroguanosine-3'-phosphate
  modified_base 12: mod_base = OTHER; note = 2'-O-methyluridine-3'-phosphate
  modified_base 13: mod_base = OTHER; note = 2'-O-methyluridine-3'-phosphate
  modified_base 14: mod_base = OTHER; note = 2'-O-methyluridine-3'-phosphate
  modified_base 15: mod_base = OTHER; note = 2'-O-methylcytidine-3'-phosphate
  modified_base 16: mod_base = OTHER; note = 2'-O-methyladenosine-3'-phosphate
  modified_base 17: mod_base = OTHER; note = 2'-O-methyladenosine-3'-phosphate
  modified_base 18: mod_base = OTHER; note = 2'-O-methylguanosine-3'-phosphate
  modified_base 19: mod_base = OTHER; note = 2'-O-methylguanosine-3'-phosphate
  modified_base 20: mod_base = OTHER; note = 2'-O-methyluridine-3'-phosphate
  modified_base 21: mod_base = OTHER; note = 2'-O-methyladenosine
ctatgttcgtgtttcaaggta

SEQ ID NO: 4179 - RNA, 21 nt, synthetic construct
  source 1..21: mol_type = other RNA
  modified_base 1: mod_base = OTHER; note = 2'-O-methyluridine-3'-phosphate
  modified_base 2: mod_base = OTHER; note = 2'-O-methyladenosine-3'-phosphate
  modified_base 3: mod_base = OTHER; note = 2'-O-methyluridine-3'-phosphate
  modified_base 4: mod_base = OTHER; note = 2'-O-methylguanosine-3'-phosphate
  modified_base 5: mod_base = OTHER; note = 2'-O-methyluridine-3'-phosphate
  modified_base 6: mod_base = OTHER; note = 2'-O-methyluridine-3'-phosphate
  modified_base 7: mod_base = OTHER; note = 2'-deoxy-2'-fluorocytidine-3'-phosphate
  modified_base 8: mod_base = OTHER; note = 2'-O-methylguanosine-3'-phosphate
  modified_base 9: mod_base = OTHER; note = 2'-deoxy-2'-fluorouridine-3'-phosphate
  modified_base 10: mod_base = OTHER; note = 2'-deoxy-2'-fluoroguanosine-3'-phosphate
  modified_base 11: mod_base = OTHER; note = 2'-deoxy-2'-fluorouridine-3'-phosphate
  modified_base 12: mod_base = OTHER; note = 2'-O-methyluridine-3'-phosphate
  modified_base 13: mod_base = OTHER; note = 2'-O-methyluridine-3'-phosphate
  modified_base 14: mod_base = OTHER; note = 2'-O-methylcytidine-3'-phosphate
  modified_base 15: mod_base = OTHER; note = 2'-O-methyladenosine-3'-phosphate
  modified_base 16: mod_base = OTHER; note = 2'-O-methyladenosine-3'-phosphate
  modified_base 17: mod_base = OTHER; note = 2'-O-methylguanosine-3'-phosphate
  modified_base 18: mod_base = OTHER; note = 2'-O-methylguanosine-3'-phosphate
  modified_base 19: mod_base = OTHER; note = 2'-O-methyluridine-3'-phosphate
  modified_base 20: mod_base = OTHER; note = 2'-O-methyluridine-3'-phosphate
  modified_base 21: mod_base = OTHER; note = 2'-O-methyladenosine
tatgttcgtgtttcaaggtta

SEQ ID NO: 4180 - RNA, 21 nt, synthetic construct
  source 1..21: mol_type = other RNA
  modified_base 1: mod_base = OTHER; note = 2'-O-methyladenosine-3'-phosphate
  modified_base 2: mod_base = OTHER; note = 2'-O-methyluridine-3'-phosphate
  modified_base 3: mod_base = OTHER; note = 2'-O-methylguanosine-3'-phosphate
  modified_base 4: mod_base = OTHER; note = 2'-O-methyluridine-3'-phosphate
  modified_base 5: mod_base = OTHER; note = 2'-O-methyluridine-3'-phosphate
  modified_base 6: mod_base = OTHER; note = 2'-O-methylcytidine-3'-phosphate
  modified_base 7: mod_base = OTHER; note = 2'-deoxy-2'-fluoroguanosine-3'-phosphate
  modified_base 8: mod_base = OTHER; note = 2'-O-methyluridine-3'-phosphate
  modified_base 9: mod_base = OTHER; note = 2'-deoxy-2'-fluoroguanosine-3'-phosphate
  modified_base 10: mod_base = OTHER; note = 2'-deoxy-2'-fluorouridine-3'-phosphate
  modified_base 11: mod_base = OTHER; note = 2'-deoxy-2'-fluorouridine-3'-phosphate
  modified_base 12: mod_base = OTHER; note = 2'-O-methyluridine-3'-phosphate
  modified_base 13: mod_base = OTHER; note = 2'-O-methylcytidine-3'-phosphate
  modified_base 14: mod_base = OTHER; note = 2'-O-methyladenosine-3'-phosphate
  modified_base 15: mod_base = OTHER; note = 2'-O-methyladenosine-3'-phosphate
  modified_base 16: mod_base = OTHER; note = 2'-O-methylguanosine-3'-phosphate
  modified_base 17: mod_base = OTHER; note = 2'-O-methylguanosine-3'-phosphate
  modified_base 18: mod_base = OTHER; note = 2'-O-methyluridine-3'-phosphate
  modified_base 19: mod_base = OTHER; note = 2'-O-methyluridine-3'-phosphate
  modified_base 20: mod_base = OTHER; note = 2'-O-methyluridine-3'-phosphate
  modified_base 21: mod_base = OTHER; note = 2'-O-methyladenosine
atgttcgtgtttcaaggttta

SEQ ID NO: 4181 - RNA, 21 nt, synthetic construct
  source 1..21: mol_type = other RNA
  modified_base 1: mod_base = OTHER; note = 2'-O-methyluridine-3'-phosphate
  modified_base 2: mod_base = OTHER; note = 2'-O-methylguanosine-3'-phosphate
  modified_base 3: mod_base = OTHER; note = 2'-O-methyluridine-3'-phosphate
  modified_base 4: mod_base = OTHER; note = 2'-O-methyluridine-3'-phosphate
  modified_base 5: mod_base = OTHER; note = 2'-O-methylcytidine-3'-phosphate
  modified_base 6: mod_base = OTHER; note = 2'-O-methylguanosine-3'-phosphate
  modified_base 7: mod_base = OTHER; note = 2'-deoxy-2'-fluorouridine-3'-phosphate
  modified_base 8: mod_base = OTHER; note = 2'-O-methylguanosine-3'-phosphate
  modified_base 9: mod_base = OTHER; note = 2'-deoxy-2'-fluorouridine-3'-phosphate
  modified_base 10: mod_base = OTHER; note = 2'-deoxy-2'-fluorouridine-3'-phosphate
  modified_base 11: mod_base = OTHER; note = 2'-deoxy-2'-fluorouridine-3'-phosphate
  modified_base 12: mod_base = OTHER; note = 2'-O-methylcytidine-3'-phosphate
  modified_base 13: mod_base = OTHER; note = 2'-O-methyladenosine-3'-phosphate
  modified_base 14: mod_base = OTHER; note = 2'-O-methyladenosine-3'-phosphate
  modified_base 15: mod_base = OTHER; note = 2'-O-methylguanosine-3'-phosphate
  modified_base 16: mod_base = OTHER; note = 2'-O-methylguanosine-3'-phosphate
  modified_base 17: mod_base = OTHER; note = 2'-O-methyluridine-3'-phosphate
  modified_base 18: mod_base = OTHER; note = 2'-O-methyluridine-3'-phosphate
  modified_base 19: mod_base = OTHER; note = 2'-O-methyluridine-3'-phosphate
  modified_base 20: mod_base = OTHER; note = 2'-O-methylguanosine-3'-phosphate
  modified_base 21: mod_base = OTHER; note = 2'-O-methyladenosine
tgttcgtgtttcaaggtttga

SEQ ID NO: 4182 - RNA, 21 nt, synthetic construct
  source 1..21: mol_type = other RNA
  modified_base 1: mod_base = OTHER; note = 2'-O-methylguanosine-3'-phosphate
  modified_base 2: mod_base = OTHER; note = 2'-O-methyluridine-3'-phosphate
  modified_base 3: mod_base = OTHER; note = 2'-O-methyluridine-3'-phosphate
  modified_base 4: mod_base = OTHER; note = 2'-O-methylcytidine-3'-phosphate
  modified_base 5: mod_base = OTHER; note = 2'-O-methylguanosine-3'-phosphate
  modified_base 6: mod_base = OTHER; note = 2'-O-methyluridine-3'-phosphate
  modified_base 7: mod_base = OTHER; note = 2'-deoxy-2'-fluoroguanosine-3'-phosphate
  modified_base 8: mod_base = OTHER; note = 2'-O-methyluridine-3'-phosphate
  modified_base 9: mod_base = OTHER; note = 2'-deoxy-2'-fluorouridine-3'-phosphate
  modified_base 10: mod_base = OTHER; note = 2'-deoxy-2'-fluorouridine-3'-phosphate
  modified_base 11: mod_base = OTHER; note = 2'-deoxy-2'-fluorocytidine-3'-phosphate
  modified_base 12: mod_base = OTHER; note = 2'-O-methyladenosine-3'-phosphate
  modified_base 13: mod_base = OTHER; note = 2'-O-methyladenosine-3'-phosphate
  modified_base 14: mod_base = OTHER; note = 2'-O-methylguanosine-3'-phosphate
  modified_base 15: mod_base = OTHER; note = 2'-O-methylguanosine-3'-phosphate
  modified_base 16: mod_base = OTHER; note = 2'-O-methyluridine-3'-phosphate
  modified_base 17: mod_base = OTHER; note = 2'-O-methyluridine-3'-phosphate
  modified_base 18: mod_base = OTHER; note = 2'-O-methyluridine-3'-phosphate
  modified_base 19: mod_base = OTHER; note = 2'-O-methylguanosine-3'-phosphate
  modified_base 20: mod_base = OTHER; note = 2'-O-methyluridine-3'-phosphate
  modified_base 21: mod_base = OTHER; note = 2'-O-methyladenosine
gttcgtgtttcaaggtttgta

SEQ ID NO: 4183 - RNA, 21 nt, synthetic construct
  source 1..21: mol_type = other RNA
  modified_base 1: mod_base = OTHER; note = 2'-O-methyluridine-3'-phosphate
  modified_base 2: mod_base = OTHER; note = 2'-O-methyluridine-3'-phosphate
  modified_base 3: mod_base = OTHER; note = 2'-O-methylcytidine-3'-phosphate
  modified_base 4: mod_base = OTHER; note = 2'-O-methylguanosine-3'-phosphate
  modified_base 5: mod_base = OTHER; note = 2'-O-methyluridine-3'-phosphate
  modified_base 6: mod_base = OTHER; note = 2'-O-methylguanosine-3'-phosphate
  modified_base 7: mod_base = OTHER; note = 2'-deoxy-2'-fluorouridine-3'-phosphate
  modified_base 8: mod_base = OTHER; note = 2'-O-methyluridine-3'-phosphate
  modified_base 9: mod_base = OTHER; note = 2'-deoxy-2'-fluorouridine-3'-phosphate
  modified_base 10: mod_base = OTHER; note = 2'-deoxy-2'-fluorocytidine-3'-phosphate
  modified_base 11: mod_base = OTHER; note = 2'-deoxy-2'-fluoroadenosine-3'-phosphate
  modified_base 12: mod_base = OTHER; note = 2'-O-methyladenosine-3'-phosphate
  modified_base 13: mod_base = OTHER; note = 2'-O-methylguanosine-3'-phosphate
  modified_base 14: mod_base = OTHER; note = 2'-O-methylguanosine-3'-phosphate
  modified_base 15: mod_base = OTHER; note = 2'-O-methyluridine-3'-phosphate
  modified_base 16: mod_base = OTHER; note = 2'-O-methyluridine-3'-phosphate
  modified_base 17: mod_base = OTHER; note = 2'-O-methyluridine-3'-phosphate
  modified_base 18: mod_base = OTHER; note = 2'-O-methylguanosine-3'-phosphate
  modified_base 19: mod_base = OTHER; note = 2'-O-methyluridine-3'-phosphate
  modified_base 20: mod_base = OTHER; note = 2'-O-methyluridine-3'-phosphate
  modified_base 21: mod_base = OTHER; note = 2'-O-methyladenosine
ttcgtgtttcaaggtttgtta

SEQ ID NO: 4184 - RNA, 21 nt, synthetic construct
  source 1..21: mol_type = other RNA
  modified_base 1: mod_base = OTHER; note = 2'-O-methyluridine-3'-phosphate
  modified_base 2: mod_base = OTHER; note = 2'-O-methylcytidine-3'-phosphate
  modified_base 3: mod_base = OTHER; note = 2'-O-methylguanosine-3'-phosphate
  modified_base 4: mod_base = OTHER; note = 2'-O-methyluridine-3'-phosphate
  modified_base 5: mod_base = OTHER; note = 2'-O-methylguanosine-3'-phosphate
  modified_base 6: mod_base = OTHER; note = 2'-O-methyluridine-3'-phosphate
  modified_base 7: mod_base = OTHER; note = 2'-deoxy-2'-fluorouridine-3'-phosphate
  modified_base 8: mod_base = OTHER; note = 2'-O-methyluridine-3'-phosphate
  modified_base 9: mod_base = OTHER; note = 2'-deoxy-2'-fluorocytidine-3'-phosphate
  modified_base 10: mod_base = OTHER; note = 2'-deoxy-2'-fluoroadenosine-3'-phosphate
  modified_base 11: mod_base = OTHER; note = 2'-deoxy-2'-fluoroadenosine-3'-phosphate
  modified_base 12: mod_base = OTHER; note = 2'-O-methylguanosine-3'-phosphate
  modified_base 13: mod_base = OTHER; note = 2'-O-methylguanosine-3'-phosphate
  modified_base 14: mod_base = OTHER; note = 2'-O-methyluridine-3'-phosphate
  modified_base 15: mod_base = OTHER; note = 2'-O-methyluridine-3'-phosphate
  modified_base 16: mod_base = OTHER; note = 2'-O-methyluridine-3'-phosphate
  modified_base 17: mod_base = OTHER; note = 2'-O-methylguanosine-3'-phosphate
  modified_base 18: mod_base = OTHER; note = 2'-O-methyluridine-3'-phosphate
  modified_base 19: mod_base = OTHER; note = 2'-O-methyluridine-3'-phosphate
  modified_base 20: mod_base = OTHER; note = 2'-O-methyladenosine-3'-phosphate
  modified_base 21: mod_base = OTHER; note = 2'-O-methyladenosine
tcgtgtttcaaggtttgttaa

SEQ ID NO: 4185 - RNA, 21 nt, synthetic construct
  source 1..21: mol_type = other RNA
  modified_base 1: mod_base = OTHER; note = 2'-O-methylcytidine-3'-phosphate
  modified_base 2: mod_base = OTHER; note = 2'-O-methylguanosine-3'-phosphate
  modified_base 3: mod_base = OTHER; note = 2'-O-methyluridine-3'-phosphate
  modified_base 4: mod_base = OTHER; note = 2'-O-methylguanosine-3'-phosphate
  modified_base 5: mod_base = OTHER; note = 2'-O-methyluridine-3'-phosphate
  modified_base 6: mod_base = OTHER; note = 2'-O-methyluridine-3'-phosphate
  modified_base 7: mod_base = OTHER; note = 2'-deoxy-2'-fluorouridine-3'-phosphate
  modified_base 8: mod_base = OTHER; note = 2'-O-methylcytidine-3'-phosphate
  modified_base 9: mod_base = OTHER; note = 2'-deoxy-2'-fluoroadenosine-3'-phosphate
  modified_base 10: mod_base = OTHER; note = 2'-deoxy-2'-fluoroadenosine-3'-phosphate
  modified_base 11: mod_base = OTHER; note = 2'-deoxy-2'-fluoroguanosine-3'-phosphate
  modified_base 12: mod_base = OTHER; note = 2'-O-methylguanosine-3'-phosphate
  modified_base 13: mod_base = OTHER; note = 2'-O-methyluridine-3'-phosphate
  modified_base 14: mod_base = OTHER; note = 2'-O-methyluridine-3'-phosphate
  modified_base 15: mod_base = OTHER; note = 2'-O-methyluridine-3'-phosphate
  modified_base 16: mod_base = OTHER; note = 2'-O-methylguanosine-3'-phosphate
  modified_base 17: mod_base = OTHER; note = 2'-O-methyluridine-3'-phosphate
  modified_base 18: mod_base = OTHER; note = 2'-O-methyluridine-3'-phosphate
  modified_base 19: mod_base = OTHER; note = 2'-O-methyladenosine-3'-phosphate
  modified_base 20: mod_base = OTHER; note = 2'-O-methylcytidine-3'-phosphate
  modified_base 21: mod_base = OTHER; note = 2'-O-methyladenosine
cgtgtttcaaggtttgttaca

SEQ ID NO: 4186 - RNA, 21 nt, synthetic construct
  source 1..21: mol_type = other RNA
  modified_base 1: mod_base = OTHER; note = 2'-O-methylguanosine-3'-phosphate
  modified_base 2: mod_base = OTHER; note = 2'-O-methyluridine-3'-phosphate
  modified_base 3: mod_base = OTHER; note = 2'-O-methylguanosine-3'-phosphate
  modified_base 4: mod_base = OTHER; note = 2'-O-methyluridine-3'-phosphate
  modified_base 5: mod_base = OTHER; note = 2'-O-methyluridine-3'-phosphate
  modified_base 6: mod_base = OTHER; note = 2'-O-methyluridine-3'-phosphate
  modified_base 7: mod_base = OTHER; note = 2'-deoxy-2'-fluorocytidine-3'-phosphate
  modified_base 8: mod_base = OTHER; note = 2'-O-methyladenosine-3'-phosphate
  modified_base 9: mod_base = OTHER; note = 2'-deoxy-2'-fluoroadenosine-3'-phosphate
  modified_base 10: mod_base = OTHER; note = 2'-deoxy-2'-fluoroguanosine-3'-phosphate
  modified_base 11: mod_base = OTHER; note = 2'-deoxy-2'-fluoroguanosine-3'-phosphate
  modified_base 12: mod_base = OTHER; note = 2'-O-methyluridine-3'-phosphate
  modified_base 13: mod_base = OTHER; note = 2'-O-methyluridine-3'-phosphate
  modified_base 14: mod_base = OTHER; note = 2'-O-methyluridine-3'-phosphate
  modified_base 15: mod_base = OTHER; note = 2'-O-methylguanosine-3'-phosphate
  modified_base 16: mod_base = OTHER; note = 2'-O-methyluridine-3'-phosphate
  modified_base 17: mod_base = OTHER; note = 2'-O-methyluridine-3'-phosphate
  modified_base 18: mod_base = OTHER; note = 2'-O-methyladenosine-3'-phosphate
  modified_base 19: mod_base = OTHER; note = 2'-O-methylcytidine-3'-phosphate
  modified_base 20: mod_base = OTHER; note = 2'-O-methyluridine-3'-phosphate
  modified_base 21: mod_base = OTHER; note = 2'-O-methyladenosine
gtgtttcaaggtttgttacta

SEQ ID NO: 4187 - RNA, 21 nt, synthetic construct
  source 1..21: mol_type = other RNA
  modified_base 1: mod_base = OTHER; note = 2'-O-methyluridine-3'-phosphate
  modified_base 2: mod_base = OTHER; note = 2'-O-methylguanosine-3'-phosphate
  modified_base 3: mod_base = OTHER; note = 2'-O-methyluridine-3'-phosphate
  modified_base 4: mod_base = OTHER; note = 2'-O-methyluridine-3'-phosphate
  modified_base 5: mod_base = OTHER; note = 2'-O-methyluridine-3'-phosphate
  modified_base 6: mod_base = OTHER; note = 2'-O-methylcytidine-3'-phosphate
  modified_base 7: mod_base = OTHER; note = 2'-deoxy-2'-fluoroadenosine-3'-phosphate
  modified_base 8: mod_base = OTHER; note = 2'-O-methyladenosine-3'-phosphate
  modified_base 9: mod_base = OTHER; note = 2'-deoxy-2'-fluoroguanosine-3'-phosphate
  modified_base 10: mod_base = OTHER; note = 2'-deoxy-2'-fluoroguanosine-3'-phosphate
  modified_base 11: mod_base = OTHER; note = 2'-deoxy-2'-fluorouridine-3'-phosphate
  modified_base 12: mod_base = OTHER; note = 2'-O-methyluridine-3'-phosphate
  modified_base 13: mod_base = OTHER; note = 2'-O-methyluridine-3'-phosphate
  modified_base 14: mod_base = OTHER; note = 2'-O-methylguanosine-3'-phosphate
  modified_base 15: mod_base = OTHER; note = 2'-O-methyluridine-3'-phosphate
  modified_base 16: mod_base = OTHER; note = 2'-O-methyluridine-3'-phosphate
  modified_base 17: mod_base = OTHER; note = 2'-O-methyladenosine-3'-phosphate
  modified_base 18: mod_base = OTHER; note = 2'-O-methylcytidine-3'-phosphate
  modified_base 19: mod_base = OTHER; note = 2'-O-methyluridine-3'-phosphate
  modified_base 20: mod_base = OTHER; note = 2'-O-methyluridine-3'-phosphate
  modified_base 21: mod_base = OTHER; note = 2'-O-methyladenosine
tgtttcaaggtttgttactta

SEQ ID NO: 4188 - RNA, 21 nt, synthetic construct
  source 1..21: mol_type = other RNA
  modified_base 1: mod_base = OTHER; note = 2'-O-methylguanosine-3'-phosphate
  modified_base 2: mod_base = OTHER; note = 2'-O-methyluridine-3'-phosphate
  modified_base 3: mod_base = OTHER; note = 2'-O-methyluridine-3'-phosphate
  modified_base 4: mod_base = OTHER; note = 2'-O-methyluridine-3'-phosphate
  modified_base 5: mod_base = OTHER; note = 2'-O-methylcytidine-3'-phosphate
  modified_base 6: mod_base = OTHER; note = 2'-O-methyladenosine-3'-phosphate
  modified_base 7: mod_base = OTHER; note = 2'-deoxy-2'-fluoroadenosine-3'-phosphate
  modified_base 8: mod_base = OTHER; note = 2'-O-methylguanosine-3'-phosphate
  modified_base 9: mod_base = OTHER; note = 2'-deoxy-2'-fluoroguanosine-3'-phosphate
  modified_base 10: mod_base = OTHER; note = 2'-deoxy-2'-fluorouridine-3'-phosphate
  modified_base 11: mod_base = OTHER; note = 2'-deoxy-2'-fluorouridine-3'-phosphate
  modified_base 12: mod_base = OTHER; note = 2'-O-methyluridine-3'-phosphate
  modified_base 13: mod_base = OTHER; note = 2'-O-methylguanosine-3'-phosphate
  modified_base 14: mod_base = OTHER; note = 2'-O-methyluridine-3'-phosphate
  modified_base 15: mod_base = OTHER; note = 2'-O-methyluridine-3'-phosphate
  modified_base 16: mod_base = OTHER; note = 2'-O-methyladenosine-3'-phosphate
  modified_base 17: mod_base = OTHER; note = 2'-O-methylcytidine-3'-phosphate
  modified_base 18: mod_base = OTHER; note = 2'-O-methyluridine-3'-phosphate
  modified_base 19: mod_base = OTHER; note = 2'-O-methyluridine-3'-phosphate
  modified_base 20: mod_base = OTHER; note = 2'-O-methylguanosine-3'-phosphate
  modified_base 21: mod_base = OTHER; note = 2'-O-methyladenosine
gtttcaaggtttgttacttga

SEQ ID NO: 4189 - RNA, 21 nt, synthetic construct
  source 1..21: mol_type = other RNA
  modified_base 1: mod_base = OTHER; note = 2'-O-methyluridine-3'-phosphate
  modified_base 2: mod_base = OTHER; note = 2'-O-methyluridine-3'-phosphate
  modified_base 3: mod_base = OTHER; note = 2'-O-methyluridine-3'-phosphate
  modified_base 4: mod_base = OTHER; note = 2'-O-methylcytidine-3'-phosphate
  modified_base 5: mod_base = OTHER; note = 2'-O-methyladenosine-3'-phosphate
  modified_base 6: mod_base = OTHER; note = 2'-O-methyladenosine-3'-phosphate
  modified_base 7: mod_base = OTHER; note = 2'-deoxy-2'-fluoroguanosine-3'-phosphate
  modified_base 8: mod_base = OTHER; note = 2'-O-methylguanosine-3'-phosphate
  modified_base 9: mod_base = OTHER; note = 2'-deoxy-2'-fluorouridine-3'-phosphate
  modified_base 10: mod_base = OTHER; note = 2'-deoxy-2'-fluorouridine-3'-phosphate
  modified_base 11: mod_base = OTHER; note = 2'-deoxy-2'-fluorouridine-3'-phosphate
  modified_base 12: mod_base = OTHER; note = 2'-O-methylguanosine-3'-phosphate
  modified_base 13: mod_base = OTHER; note = 2'-O-methyluridine-3'-phosphate
  modified_base 14: mod_base = OTHER; note = 2'-O-methyluridine-3'-phosphate
  modified_base 15: mod_base = OTHER; note = 2'-O-methyladenosine-3'-phosphate
  modified_base 16: mod_base = OTHER; note = 2'-O-methylcytidine-3'-phosphate
  modified_base 17: mod_base = OTHER; note = 2'-O-methyluridine-3'-phosphate
  modified_base 18: mod_base = OTHER; note = 2'-O-methyluridine-3'-phosphate
  modified_base 19: mod_base = OTHER; note = 2'-O-methylguanosine-3'-phosphate
  modified_base 20: mod_base = OTHER; note = 2'-O-methylguanosine-3'-phosphate
  modified_base 21: mod_base = OTHER; note = 2'-O-methyladenosine
tttcaaggtttgttacttgga

SEQ ID NO: 4190 - RNA, 21 nt, synthetic construct
  source 1..21: mol_type = other RNA
  modified_base 1: mod_base = OTHER; note = 2'-O-methyluridine-3'-phosphate
  modified_base 2: mod_base = OTHER; note = 2'-O-methyluridine-3'-phosphate
  modified_base 3: mod_base = OTHER; note = 2'-O-methylcytidine-3'-phosphate
  modified_base 4: mod_base = OTHER; note = 2'-O-methyladenosine-3'-phosphate
  modified_base 5: mod_base = OTHER; note = 2'-O-methyladenosine-3'-phosphate
  modified_base 6: mod_base = OTHER; note = 2'-O-methylguanosine-3'-phosphate
  modified_base 7: mod_base = OTHER; note = 2'-deoxy-2'-fluoroguanosine-3'-phosphate
  modified_base 8: mod_base = OTHER; note = 2'-O-methyluridine-3'-phosphate
  modified_base 9: mod_base = OTHER; note = 2'-deoxy-2'-fluorouridine-3'-phosphate
  modified_base 10: mod_base = OTHER; note = 2'-deoxy-2'-fluorouridine-3'-phosphate
  modified_base 11: mod_base = OTHER; note = 2'-deoxy-2'-fluoroguanosine-3'-phosphate
  modified_base 12: mod_base = OTHER; note = 2'-O-methyluridine-3'-phosphate
  modified_base 13: mod_base = OTHER; note = 2'-O-methyluridine-3'-phosphate
  modified_base 14: mod_base = OTHER; note = 2'-O-methyladenosine-3'-phosphate
  modified_base 15: mod_base = OTHER; note = 2'-O-methylcytidine-3'-phosphate
  modified_base 16: mod_base = OTHER; note = 2'-O-methyluridine-3'-phosphate
  modified_base 17: mod_base = OTHER; note = 2'-O-methyluridine-3'-phosphate
  modified_base 18: mod_base = OTHER; note = 2'-O-methylguanosine-3'-phosphate
  modified_base 19: mod_base = OTHER; note = 2'-O-methylguanosine-3'-phosphate
  modified_base 20: mod_base = OTHER; note = 2'-O-methyladenosine-3'-phosphate
  modified_base 21: mod_base = OTHER; note = 2'-O-methyladenosine
ttcaaggtttgttacttggaa

SEQ ID NO: 4191 - RNA, 21 nt, synthetic construct
  source 1..21: mol_type = other RNA
  modified_base 1: mod_base = OTHER; note = 2'-O-methyluridine-3'-phosphate
  modified_base 2: mod_base = OTHER; note = 2'-O-methylcytidine-3'-phosphate
  modified_base 3: mod_base = OTHER; note = 2'-O-methyladenosine-3'-phosphate
  modified_base 4: mod_base = OTHER; note = 2'-O-methyladenosine-3'-phosphate
  modified_base 5: mod_base = OTHER; note = 2'-O-methylguanosine-3'-phosphate
  modified_base 6: mod_base = OTHER; note = 2'-O-methylguanosine-3'-phosphate
  modified_base 7: mod_base = OTHER; note = 2'-deoxy-2'-fluorouridine-3'-phosphate
  modified_base 8: mod_base = OTHER; note = 2'-O-methyluridine-3'-phosphate
  modified_base 9: mod_base = OTHER; note = 2'-deoxy-2'-fluorouridine-3'-phosphate
  modified_base 10: mod_base = OTHER; note = 2'-deoxy-2'-fluoroguanosine-3'-phosphate
  modified_base 11: mod_base = OTHER; note = 2'-deoxy-2'-fluorouridine-3'-phosphate
  modified_base 12: mod_base = OTHER; note = 2'-O-methyluridine-3'-phosphate
  modified_base 13: mod_base = OTHER; note = 2'-O-methyladenosine-3'-phosphate
  modified_base 14: mod_base = OTHER; note = 2'-O-methylcytidine-3'-phosphate
  modified_base 15: mod_base = OTHER; note = 2'-O-methyluridine-3'-phosphate
  modified_base 16: mod_base = OTHER; note = 2'-O-methyluridine-3'-phosphate
  modified_base 17: mod_base = OTHER; note = 2'-O-methylguanosine-3'-phosphate
  modified_base 18: mod_base = OTHER; note = 2'-O-methylguanosine-3'-phosphate
  modified_base 19: mod_base = OTHER; note = 2'-O-methyladenosine-3'-phosphate
  modified_base 20: mod_base = OTHER; note = 2'-O-methyluridine-3'-phosphate
  modified_base 21: mod_base = OTHER; note = 2'-O-methyladenosine
tcaaggtttgttacttggata

SEQ ID NO: 4192 - RNA, 21 nt, synthetic construct
  source 1..21: mol_type = other RNA
  modified_base 1: mod_base = OTHER; note = 2'-O-methyluridine-3'-phosphate
  modified_base 2: mod_base = OTHER; note = 2'-O-methylguanosine-3'-phosphate
  modified_base 3: mod_base = OTHER; note = 2'-O-methyluridine-3'-phosphate
  modified_base 4: mod_base = OTHER; note = 2'-O-methyluridine-3'-phosphate
  modified_base 5: mod_base = OTHER; note = 2'-O-methyladenosine-3'-phosphate
  modified_base 6: mod_base = OTHER; note = 2'-O-methylcytidine-3'-phosphate
  modified_base 7: mod_base = OTHER; note = 2'-deoxy-2'-fluorouridine-3'-phosphate
  modified_base 8: mod_base = OTHER; note = 2'-O-methyluridine-3'-phosphate
  modified_base 9: mod_base = OTHER; note = 2'-deoxy-2'-fluoroguanosine-3'-phosphate
  modified_base 10: mod_base = OTHER; note = 2'-deoxy-2'-fluoroguanosine-3'-phosphate
  modified_base 11: mod_base = OTHER; note = 2'-deoxy-2'-fluoroadenosine-3'-phosphate
  modified_base 12: mod_base = OTHER; note = 2'-O-methyluridine-3'-phosphate
  modified_base 13: mod_base = OTHER; note = 2'-O-methyluridine-3'-phosphate
  modified_base 14: mod_base = OTHER; note = 2'-O-methylguanosine-3'-phosphate
  modified_base 15: mod_base = OTHER; note = 2'-O-methyladenosine-3'-phosphate
  modified_base 16: mod_base = OTHER; note = 2'-O-methylguanosine-3'-phosphate
  modified_base 17: mod_base = OTHER; note = 2'-O-methylguanosine-3'-phosphate
  modified_base 18: mod_base = OTHER; note = 2'-O-methylguanosine-3'-phosphate
  modified_base 19: mod_base = OTHER; note = 2'-O-methyladenosine-3'-phosphate
  modified_base 20: mod_base = OTHER; note = 2'-O-methylguanosine-3'-phosphate
  modified_base 21: mod_base = OTHER; note = 2'-O-methyladenosine
tgttacttggattgagggaga

SEQ ID NO: 4193 - RNA, 21 nt, synthetic construct
  source 1..21: mol_type = other RNA
  modified_base 1: mod_base = OTHER; note = 2'-O-methylguanosine-3'-phosphate
  modified_base 2: mod_base = OTHER; note = 2'-O-methyluridine-3'-phosphate
  modified_base 3: mod_base = OTHER; note = 2'-O-methyluridine-3'-phosphate
  modified_base 4: mod_base = OTHER; note = 2'-O-methyladenosine-3'-phosphate
  modified_base 5: mod_base = OTHER; note = 2'-O-methylcytidine-3'-phosphate
  modified_base 6: mod_base = OTHER; note = 2'-O-methyluridine-3'-phosphate
  modified_base 7: mod_base = OTHER; note = 2'-deoxy-2'-fluorouridine-3'-phosphate
  modified_base 8: mod_base = OTHER; note = 2'-O-methylguanosine-3'-phosphate
  modified_base 9: mod_base = OTHER; note = 2'-deoxy-2'-fluoroguanosine-3'-phosphate
  modified_base 10: mod_base = OTHER; note = 2'-deoxy-2'-fluoroadenosine-3'-phosphate
  modified_base 11: mod_base = OTHER; note = 2'-deoxy-2'-fluorouridine-3'-phosphate
  modified_base 12: mod_base = OTHER; note = 2'-O-methyluridine-3'-phosphate
  modified_base 13: mod_base = OTHER; note = 2'-O-methylguanosine-3'-phosphate
  modified_base 14: mod_base = OTHER; note = 2'-O-methyladenosine-3'-phosphate
  modified_base 15: mod_base = OTHER; note = 2'-O-methylguanosine-3'-phosphate
  modified_base 16: mod_base = OTHER; note = 2'-O-methylguanosine-3'-phosphate
  modified_base 17: mod_base = OTHER; note = 2'-O-methylguanosine-3'-phosphate
  modified_base 18: mod_base = OTHER; note = 2'-O-methyladenosine-3'-phosphate
  modified_base 19: mod_base = OTHER; note = 2'-O-methylguanosine-3'-phosphate
  modified_base 20: mod_base = OTHER; note = 2'-O-methyluridine-3'-phosphate
  modified_base 21: mod_base = OTHER; note = 2'-O-methyladenosine
gttacttggattgagggagta

SEQ ID NO: 4194 - RNA, 21 nt, synthetic construct
  source 1..21: mol_type = other RNA
  modified_base 1: mod_base = OTHER; note = 2'-O-methyluridine-3'-phosphate
  modified_base 2: mod_base = OTHER; note = 2'-O-methyladenosine-3'-phosphate
  modified_base 3: mod_base = OTHER; note = 2'-O-methylcytidine-3'-phosphate
  modified_base 4: mod_base = OTHER; note = 2'-O-methyluridine-3'-phosphate
  modified_base 5: mod_base = OTHER; note = 2'-O-methyluridine-3'-phosphate
  modified_base 6: mod_base = OTHER; note = 2'-O-methylguanosine-3'-phosphate
  modified_base 7: mod_base = OTHER; note = 2'-deoxy-2'-fluoroguanosine-3'-phosphate
  modified_base 8: mod_base = OTHER; note = 2'-O-methyladenosine-3'-phosphate
  modified_base 9: mod_base = OTHER; note = 2'-deoxy-2'-fluorouridine-3'-phosphate
  modified_base 10: mod_base = OTHER; note = 2'-deoxy-2'-fluorouridine-3'-phosphate
  modified_base 11: mod_base = OTHER; note = 2'-deoxy-2'-fluoroguanosine-3'-phosphate
  modified_base 12: mod_base = OTHER; note = 2'-O-methyladenosine-3'-phosphate
  modified_base 13: mod_base = OTHER; note = 2'-O-methylguanosine-3'-phosphate
  modified_base 14: mod_base = OTHER; note = 2'-O-methylguanosine-3'-phosphate
  modified_base 15: mod_base = OTHER; note = 2'-O-methylguanosine-3'-phosphate
  modified_base 16: mod_base = OTHER; note = 2'-O-methyladenosine-3'-phosphate
  modified_base 17: mod_base = OTHER; note = 2'-O-methylguanosine-3'-phosphate
  modified_base 18: mod_base = OTHER; note = 2'-O-methyluridine-3'-phosphate
  modified_base 19: mod_base = OTHER; note = 2'-O-methylguanosine-3'-phosphate
  modified_base 20: mod_base = OTHER; note = 2'-O-methyladenosine-3'-phosphate
  modified_base 21: mod_base = OTHER; note = 2'-O-methyladenosine
tacttggattgagggagtgaa

SEQ ID NO: 4195 - RNA, 21 nt, synthetic construct
  source 1..21: mol_type = other RNA
  modified_base 1: mod_base = OTHER; note = 2'-O-methyladenosine-3'-phosphate
  modified_base 2: mod_base = OTHER; note = 2'-O-methylcytidine-3'-phosphate
  modified_base 3: mod_base = OTHER; note = 2'-O-methyluridine-3'-phosphate
  modified_base 4: mod_base = OTHER; note = 2'-O-methyluridine-3'-phosphate
  modified_base 5: mod_base = OTHER; note = 2'-O-methylguanosine-3'-phosphate
  modified_base 6: mod_base = OTHER; note = 2'-O-methylguanosine-3'-phosphate
  modified_base 7: mod_base = OTHER; note = 2'-deoxy-2'-fluoroadenosine-3'-phosphate
  modified_base 8: mod_base = OTHER; note = 2'-O-methyluridine-3'-phosphate
  modified_base 9: mod_base = OTHER; note = 2'-deoxy-2'-fluorouridine-3'-phosphate
  modified_base 10: mod_base = OTHER; note = 2'-deoxy-2'-fluoroguanosine-3'-phosphate
  modified_base 11: mod_base = OTHER; note = 2'-deoxy-2'-fluoroadenosine-3'-phosphate
  modified_base 12: mod_base = OTHER; note = 2'-O-methylguanosine-3'-phosphate
  modified_base 13: mod_base = OTHER; note = 2'-O-methylguanosine-3'-phosphate
  modified_base 14: mod_base = OTHER; note = 2'-O-methylguanosine-3'-phosphate
  modified_base 15: mod_base = OTHER; note = 2'-O-methyladenosine-3'-phosphate
  modified_base 16: mod_base = OTHER; note = 2'-O-methylguanosine-3'-phosphate
  modified_base 17: mod_base = OTHER; note = 2'-O-methyluridine-3'-phosphate
  modified_base 18: mod_base = OTHER; note = 2'-O-methylguanosine-3'-phosphate
  modified_base 19: mod_base = OTHER; note = 2'-O-methyladenosine-3'-phosphate
  modified_base 20: mod_base = OTHER; note = 2'-O-methyluridine-3'-phosphate
  modified_base 21: mod_base = OTHER; note = 2'-O-methyladenosine
acttggattgagggagtgata

SEQ ID NO: 4196 - RNA, 21 nt, synthetic construct
  source 1..21: mol_type = other RNA
  modified_base 1: mod_base = OTHER; note = 2'-O-methylcytidine-3'-phosphate
  modified_base 2: mod_base = OTHER; note = 2'-O-methyluridine-3'-phosphate
  modified_base 3: mod_base = OTHER; note = 2'-O-methyluridine-3'-phosphate
  modified_base 4: mod_base = OTHER; note = 2'-O-methylguanosine-3'-phosphate
  modified_base 5: mod_base = OTHER; note = 2'-O-methylguanosine-3'-phosphate
  modified_base 6: mod_base = OTHER; note = 2'-O-methyladenosine-3'-phosphate
  modified_base 7: mod_base = OTHER; note = 2'-deoxy-2'-fluorouridine-3'-phosphate
  modified_base 8: mod_base = OTHER; note = 2'-O-methyluridine-3'-phosphate
  modified_base 9: mod_base = OTHER; note = 2'-deoxy-2'-fluoroguanosine-3'-phosphate
  modified_base 10: mod_base = OTHER; note = 2'-deoxy-2'-fluoroadenosine-3'-phosphate
  modified_base 11: mod_base = OTHER; note = 2'-deoxy-2'-fluoroguanosine-3'-phosphate
  modified_base 12: mod_base = OTHER; note = 2'-O-methylguanosine-3'-phosphate
  modified_base 13: mod_base = OTHER; note = 2'-O-methylguanosine-3'-phosphate
  modified_base 14: mod_base = OTHER; note = 2'-O-methyladenosine-3'-phosphate
  modified_base 15: mod_base = OTHER; note = 2'-O-methylguanosine-3'-phosphate
  modified_base 16: mod_base = OTHER; note = 2'-O-methyluridine-3'-phosphate
  modified_base 17: mod_base = OTHER; note = 2'-O-methylguanosine-3'-phosphate
  modified_base 18: mod_base = OTHER; note = 2'-O-methyladenosine-3'-phosphate
  modified_base 19: mod_base = OTHER; note = 2'-O-methyluridine-3'-phosphate
  modified_base 20: mod_base = OTHER; note = 2'-O-methylguanosine-3'-phosphate
  modified_base 21: mod_base = OTHER; note = 2'-O-methyladenosine
cttggattgagggagtgatga

SEQ ID NO: 4197 - RNA, 21 nt, synthetic construct
  source 1..21: mol_type = other RNA
  modified_base 1: mod_base = OTHER; note = 2'-O-methyluridine-3'-phosphate
  modified_base 2: mod_base = OTHER; note = 2'-O-methyluridine-3'-phosphate
  modified_base 3: mod_base = OTHER; note = 2'-O-methylguanosine-3'-phosphate
  modified_base 4: mod_base = OTHER; note = 2'-O-methylguanosine-3'-phosphate
  modified_base 5: mod_base = OTHER; note = 2'-O-methyladenosine-3'-phosphate
  modified_base 6: mod_base = OTHER; note = 2'-O-methyluridine-3'-phosphate
  modified_base 7: mod_base = OTHER; note = 2'-deoxy-2'-fluorouridine-3'-phosphate
  modified_base 8: mod_base = OTHER; note = 2'-O-methylguanosine-3'-phosphate
  modified_base 9: mod_base = OTHER; note = 2'-deoxy-2'-fluoroadenosine-3'-phosphate
  modified_base 10: mod_base = OTHER; note = 2'-deoxy-2'-fluoroguanosine-3'-phosphate
  modified_base 11: mod_base = OTHER; note = 2'-deoxy-2'-fluoroguanosine-3'-phosphate
  modified_base 12: mod_base = OTHER; note = 2'-O-methylguanosine-3'-phosphate
  modified_base 13: mod_base = OTHER; note = 2'-O-methyladenosine-3'-phosphate
  modified_base 14: mod_base = OTHER; note = 2'-O-methylguanosine-3'-phosphate
  modified_base 15: mod_base = OTHER; note = 2'-O-methyluridine-3'-phosphate
  modified_base 16: mod_base = OTHER; note = 2'-O-methylguanosine-3'-phosphate
  modified_base 17: mod_base = OTHER; note = 2'-O-methyladenosine-3'-phosphate
  modified_base 18: mod_base = OTHER; note = 2'-O-methyluridine-3'-phosphate
  modified_base 19: mod_base = OTHER; note = 2'-O-methylguanosine-3'-phosphate
  modified_base 20: mod_base = OTHER; note = 2'-O-methyladenosine-3'-phosphate
  modified_base 21: mod_base = OTHER; note = 2'-O-methyladenosine
ttggattgagggagtgatgaa

SEQ ID NO: 4198 - RNA, 21 nt, synthetic construct
  source 1..21: mol_type = other RNA
  modified_base 1: mod_base = OTHER; note = 2'-O-methyluridine-3'-phosphate
  modified_base 2: mod_base = OTHER; note = 2'-O-methylguanosine-3'-phosphate
  modified_base 3: mod_base = OTHER; note = 2'-O-methylguanosine-3'-phosphate
  modified_base 4: mod_base = OTHER; note = 2'-O-methyladenosine-3'-phosphate
  modified_base 5: mod_base = OTHER; note = 2'-O-methyluridine-3'-phosphate
  modified_base 6: mod_base = OTHER; note = 2'-O-methyluridine-3'-phosphate
  modified_base 7: mod_base = OTHER; note = 2'-deoxy-2'-fluoroguanosine-3'-phosphate
  modified_base 8: mod_base = OTHER; note = 2'-O-methyladenosine-3'-phosphate
  modified_base 9: mod_base = OTHER; note = 2'-deoxy-2'-fluoroguanosine-3'-phosphate
  modified_base 10: mod_base = OTHER; note = 2'-deoxy-2'-fluoroguanosine-3'-phosphate
  modified_base 11: mod_base = OTHER; note = 2'-deoxy-2'-fluoroguanosine-3'-phosphate
  modified_base 12: mod_base = OTHER; note = 2'-O-methyladenosine-3'-phosphate
  modified_base 13: mod_base = OTHER; note = 2'-O-methylguanosine-3'-phosphate
  modified_base 14: mod_base = OTHER; note = 2'-O-methyluridine-3'-phosphate
  modified_base 15: mod_base = OTHER; note = 2'-O-methylguanosine-3'-phosphate
  modified_base 16: mod_base = OTHER; note = 2'-O-methyladenosine-3'-phosphate
  modified_base 17: mod_base = OTHER; note = 2'-O-methyluridine-3'-phosphate
  modified_base 18: mod_base = OTHER; note = 2'-O-methylguanosine-3'-phosphate
  modified_base 19: mod_base = OTHER; note = 2'-O-methyladenosine-3'-phosphate
  modified_base 20: mod_base = OTHER; note = 2'-O-methylguanosine-3'-phosphate
  modified_base 21: mod_base = OTHER; note = 2'-O-methyladenosine
tggattgagggagtgatgaga

SEQ ID NO: 4199 - RNA, 21 nt, synthetic construct
  source 1..21: mol_type = other RNA
  modified_base 1: mod_base = OTHER; note = 2'-O-methylguanosine-3'-phosphate
  modified_base 2: mod_base = OTHER; note = 2'-O-methylguanosine-3'-phosphate
  modified_base 3: mod_base = OTHER; note = 2'-O-methyladenosine-3'-phosphate
  modified_base 4: mod_base = OTHER; note = 2'-O-methyluridine-3'-phosphate
  modified_base 5: mod_base = OTHER; note = 2'-O-methyluridine-3'-phosphate
  modified_base 6: mod_base = OTHER; note = 2'-O-methylguanosine-3'-phosphate
  modified_base 7: mod_base = OTHER; note = 2'-deoxy-2'-fluoroadenosine-3'-phosphate
  modified_base 8: mod_base = OTHER; note = 2'-O-methylguanosine-3'-phosphate
  modified_base 9: mod_base = OTHER; note = 2'-deoxy-2'-fluoroguanosine-3'-phosphate
  modified_base 10: mod_base = OTHER; note = 2'-deoxy-2'-fluoroguanosine-3'-phosphate
  modified_base 11: mod_base = OTHER; note = 2'-deoxy-2'-fluoroadenosine-3'-phosphate
  modified_base 12: mod_base = OTHER; note = 2'-O-methylguanosine-3'-phosphate
  modified_base 13: mod_base = OTHER; note = 2'-O-methyluridine-3'-phosphate
  modified_base 14: mod_base = OTHER; note = 2'-O-methylguanosine-3'-phosphate
  modified_base 15: mod_base = OTHER; note = 2'-O-methyladenosine-3'-phosphate
  modified_base 16: mod_base = OTHER; note = 2'-O-methyluridine-3'-phosphate
  modified_base 17: mod_base = OTHER; note = 2'-O-methylguanosine-3'-phosphate
  modified_base 18: mod_base = OTHER; note = 2'-O-methyladenosine-3'-phosphate
  modified_base 19: mod_base = OTHER; note = 2'-O-methylguanosine-3'-phosphate
  modified_base 20: mod_base = OTHER; note = 2'-O-methyladenosine-3'-phosphate
  modified_base 21: mod_base = OTHER; note = 2'-O-methyladenosine
ggattgagggagtgatgagaa

SEQ ID NO: 4200 - RNA, 21 nt, synthetic construct
  source 1..21: mol_type = other RNA
  modified_base 1: mod_base = OTHER; note = 2'-O-methylguanosine-3'-phosphate
  modified_base 2: mod_base = OTHER; note = 2'-O-methyladenosine-3'-phosphate
  modified_base 3: mod_base = OTHER; note = 2'-O-methyluridine-3'-phosphate
  modified_base 4: mod_base = OTHER; note = 2'-O-methyluridine-3'-phosphate
  modified_base 5: mod_base = OTHER; note = 2'-O-methylguanosine-3'-phosphate
  modified_base 6: mod_base = OTHER; note = 2'-O-methyladenosine-3'-phosphate
  modified_base 7: mod_base = OTHER; note = 2'-deoxy-2'-fluoroguanosine-3'-phosphate
  modified_base 8: mod_base = OTHER; note = 2'-O-methylguanosine-3'-phosphate
  modified_base 9: mod_base = OTHER; note = 2'-deoxy-2'-fluoroguanosine-3'-phosphate
  modified_base 10: mod_base = OTHER; note = 2'-deoxy-2'-fluoroadenosine-3'-phosphate
  modified_base 11: mod_base = OTHER; note = 2'-deoxy-2'-fluoroguanosine-3'-phosphate
  modified_base 12: mod_base = OTHER; note = 2'-O-methyluridine-3'-phosphate
  modified_base 13: mod_base = OTHER; note = 2'-O-methylguanosine-3'-phosphate
  modified_base 14: mod_base = OTHER; note = 2'-O-methyladenosine-3'-phosphate
  modified_base 15: mod_base = OTHER; note = 2'-O-methyluridine-3'-phosphate
  modified_base 16: mod_base = OTHER; note = 2'-O-methylguanosine-3'-phosphate
  modified_base 17: mod_base = OTHER; note = 2'-O-methyladenosine-3'-phosphate
  modified_base 18: mod_base = OTHER; note = 2'-O-methylguanosine-3'-phosphate
  modified_base 19: mod_base = OTHER; note = 2'-O-methyladenosine-3'-phosphate
  modified_base 20: mod_base = OTHER; note = 2'-O-methyladenosine-3'-phosphate
  modified_base 21: mod_base = OTHER; note = 2'-O-methyladenosine
gattgagggagtgatgagaaa

SEQ ID NO: 4201 - RNA, 21 nt, synthetic construct
  source 1..21: mol_type = other RNA
  modified_base 1: mod_base = OTHER; note = 2'-O-methyladenosine-3'-phosphate
  modified_base 2: mod_base = OTHER; note = 2'-O-methyluridine-3'-phosphate
  modified_base 3: mod_base = OTHER; note = 2'-O-methyluridine-3'-phosphate
  modified_base 4: mod_base = OTHER; note = 2'-O-methylguanosine-3'-phosphate
  modified_base 5: mod_base = OTHER; note = 2'-O-methyladenosine-3'-phosphate
  modified_base 6: mod_base = OTHER; note = 2'-O-methylguanosine-3'-phosphate
  modified_base 7: mod_base = OTHER; note = 2'-deoxy-2'-fluoroguanosine-3'-phosphate
  modified_base 8: mod_base = OTHER; note = 2'-O-methylguanosine-3'-phosphate
  modified_base 9: mod_base = OTHER; note = 2'-deoxy-2'-fluoroadenosine-3'-phosphate
  modified_base 10: mod_base = OTHER; note = 2'-deoxy-2'-fluoroguanosine-3'-phosphate
  modified_base 11: mod_base = OTHER; note = 2'-deoxy-2'-fluorouridine-3'-phosphate
  modified_base 12: mod_base = OTHER; note = 2'-O-methylguanosine-3'-phosphate
  modified_base 13: mod_base = OTHER; note = 2'-O-methyladenosine-3'-phosphate
  modified_base 14: mod_base = OTHER; note = 2'-O-methyluridine-3'-phosphate
  modified_base 15: mod_base = OTHER; note = 2'-O-methylguanosine-3'-phosphate
  modified_base 16: mod_base = OTHER; note = 2'-O-methyladenosine-3'-phosphate
  modified_base 17: mod_base = OTHER; note = 2'-O-methylguanosine-3'-phosphate
  modified_base 18: mod_base = OTHER; note = 2'-O-methyladenosine-3'-phosphate
  modified_base 19: mod_base = OTHER; note = 2'-O-methyladenosine-3'-phosphate
  modified_base 20: mod_base = OTHER; note = 2'-O-methyladenosine-3'-phosphate
  modified_base 21: mod_base = OTHER; note = 2'-O-methyladenosine
attgagggagtgatgagaaaa

SEQ ID NO: 4202 - RNA, 21 nt, synthetic construct
  source 1..21: mol_type = other RNA
  modified_base 1: mod_base = OTHER; note = 2'-O-methyluridine-3'-phosphate
  modified_base 2: mod_base = OTHER; note = 2'-O-methyluridine-3'-phosphate
  modified_base 3: mod_base = OTHER; note = 2'-O-methylguanosine-3'-phosphate
  modified_base 4: mod_base = OTHER; note = 2'-O-methyladenosine-3'-phosphate
  modified_base 5: mod_base = OTHER; note = 2'-O-methylguanosine-3'-phosphate
  modified_base 6: mod_base = OTHER; note = 2'-O-methylguanosine-3'-phosphate
  modified_base 7: mod_base = OTHER; note = 2'-deoxy-2'-fluoroguanosine-3'-phosphate
  modified_base 8: mod_base = OTHER; note = 2'-O-methyladenosine-3'-phosphate
  modified_base 9: mod_base = OTHER; note = 2'-deoxy-2'-fluoroguanosine-3'-phosphate
  modified_base 10: mod_base = OTHER; note = 2'-deoxy-2'-fluorouridine-3'-phosphate
  modified_base 11: mod_base = OTHER; note = 2'-deoxy-2'-fluoroguanosine-3'-phosphate
  modified_base 12: mod_base = OTHER; note = 2'-O-methyladenosine-3'-phosphate
  modified_base 13: mod_base = OTHER; note = 2'-O-methyluridine-3'-phosphate
  modified_base 14: mod_base = OTHER; note = 2'-O-methylguanosine-3'-phosphate
  modified_base 15: mod_base = OTHER; note = 2'-O-methyladenosine-3'-phosphate
  modified_base 16: mod_base = OTHER; note = 2'-O-methylguanosine-3'-phosphate
  modified_base 17: mod_base = OTHER; note = 2'-O-methyladenosine-3'-phosphate
  modified_base 18: mod_base = OTHER; note = 2'-O-methyladenosine-3'-phosphate
  modified_base 19: mod_base = OTHER; note = 2'-O-methyladenosine-3'-phosphate
  modified_base 20: mod_base = OTHER; note = 2'-O-methyluridine-3'-phosphate
  modified_base 21: mod_base = OTHER; note = 2'-O-methyladenosine
ttgagggagtgatgagaaata

SEQ ID NO: 4203 - RNA, 21 nt, synthetic construct
  source 1..21: mol_type = other RNA
  modified_base 1: mod_base = OTHER; note = 2'-O-methyluridine-3'-phosphate
  modified_base 2: mod_base = OTHER; note = 2'-O-methylguanosine-3'-phosphate
  modified_base 3: mod_base = OTHER; note = 2'-O-methyladenosine-3'-phosphate
  modified_base 4: mod_base = OTHER; note = 2'-O-methylguanosine-3'-phosphate
  modified_base 5: mod_base = OTHER; note = 2'-O-methylguanosine-3'-phosphate
  modified_base 6: mod_base = OTHER; note = 2'-O-methylguanosine-3'-phosphate
  modified_base 7: mod_base = OTHER; note = 2'-deoxy-2'-fluoroadenosine-3'-phosphate
  modified_base 8: mod_base = OTHER; note = 2'-O-methylguanosine-3'-phosphate
  modified_base 9: mod_base = OTHER; note = 2'-deoxy-2'-fluorouridine-3'-phosphate
  modified_base 10: mod_base = OTHER; note = 2'-deoxy-2'-fluoroguanosine-3'-phosphate
  modified_base 11: mod_base = OTHER; note = 2'-deoxy-2'-fluoroadenosine-3'-phosphate
  modified_base 12: mod_base = OTHER; note = 2'-O-methyluridine-3'-phosphate
  modified_base 13: mod_base = OTHER; note = 2'-O-methylguanosine-3'-phosphate
  modified_base 14: mod_base = OTHER; note = 2'-O-methyladenosine-3'-phosphate
  modified_base 15: mod_base = OTHER; note = 2'-O-methylguanosine-3'-phosphate
  modified_base 16: mod_base = OTHER; note = 2'-O-methyladenosine-3'-phosphate
  modified_base 17: mod_base = OTHER; note = 2'-O-methyladenosine-3'-phosphate
  modified_base 18: mod_base = OTHER; note = 2'-O-methyladenosine-3'-phosphate
  modified_base 19: mod_base = OTHER; note = 2'-O-methyluridine-3'-phosphate
  modified_base 20: mod_base = OTHER; note = 2'-O-methyladenosine-3'-phosphate
  modified_base 21: mod_base = OTHER; note = 2'-O-methyladenosine
tgagggagtgatgagaaataa

SEQ ID NO: 4204 - RNA, 21 nt, synthetic construct
  source 1..21: mol_type = other RNA
  modified_base 1: mod_base = OTHER; note = 2'-O-methylguanosine-3'-phosphate
  modified_base 2: mod_base = OTHER; note = 2'-O-methyladenosine-3'-phosphate
  modified_base 3: mod_base = OTHER; note = 2'-O-methylguanosine-3'-phosphate
  modified_base 4: mod_base = OTHER; note = 2'-O-methylguanosine-3'-phosphate
  modified_base 5: mod_base = OTHER; note = 2'-O-methylguanosine-3'-phosphate
  modified_base 6: mod_base = OTHER; note = 2'-O-methyladenosine-3'-phosphate
  modified_base 7: mod_base = OTHER; note = 2'-deoxy-2'-fluoroguanosine-3'-phosphate
  modified_base 8: mod_base = OTHER; note = 2'-O-methyluridine-3'-phosphate
  modified_base 9: mod_base = OTHER; note = 2'-deoxy-2'-fluoroguanosine-3'-phosphate
  modified_base 10: mod_base = OTHER; note = 2'-deoxy-2'-fluoroadenosine-3'-phosphate
  modified_base 11: mod_base = OTHER; note = 2'-deoxy-2'-fluorouridine-3'-phosphate
  modified_base 12: mod_base = OTHER; note = 2'-O-methylguanosine-3'-phosphate
  modified_base 13: mod_base = OTHER; note = 2'-O-methyladenosine-3'-phosphate
  modified_base 14: mod_base = OTHER; note = 2'-O-methylguanosine-3'-phosphate
  modified_base 15: mod_base = OTHER; note = 2'-O-methyladenosine-3'-phosphate
  modified_base 16: mod_base = OTHER; note = 2'-O-methyladenosine-3'-phosphate
  modified_base 17: mod_base = OTHER; note = 2'-O-methyladenosine-3'-phosphate
  modified_base 18: mod_base = OTHER; note = 2'-O-methyluridine-3'-phosphate
  modified_base 19: mod_base = OTHER; note = 2'-O-methyladenosine-3'-phosphate
  modified_base 20: mod_base = OTHER; note = 2'-O-methyladenosine-3'-phosphate
  modified_base 21: mod_base = OTHER; note = 2'-O-methyladenosine
gagggagtgatgagaaataaa

SEQ ID NO: 4205 - RNA, 21 nt, synthetic construct
  source 1..21: mol_type = other RNA
  modified_base 1: mod_base = OTHER; note = 2'-O-methylguanosine-3'-phosphate
  modified_base 2: mod_base = OTHER; note = 2'-O-methylguanosine-3'-phosphate
  modified_base 3: mod_base = OTHER; note = 2'-O-methylguanosine-3'-phosphate
  modified_base 4: mod_base = OTHER; note = 2'-O-methyladenosine-3'-phosphate
  modified_base 5: mod_base = OTHER; note = 2'-O-methylguanosine-3'-phosphate
  modified_base 6: mod_base = OTHER; note = 2'-O-methyluridine-3'-phosphate
  modified_base 7: mod_base = OTHER; note = 2'-deoxy-2'-fluoroguanosine-3'-phosphate
  modified_base 8: mod_base = OTHER; note = 2'-O-methyladenosine-3'-phosphate
  modified_base 9: mod_base = OTHER; note = 2'-deoxy-2'-fluorouridine-3'-phosphate
  modified_base 10: mod_base = OTHER; note = 2'-deoxy-2'-fluoroguanosine-3'-phosphate
  modified_base 11: mod_base = OTHER; note = 2'-deoxy-2'-fluoroadenosine-3'-phosphate
  modified_base 12: mod_base = OTHER; note = 2'-O-methylguanosine-3'-phosphate
  modified_base 13: mod_base = OTHER; note = 2'-O-methyladenosine-3'-phosphate
  modified_base 14: mod_base = OTHER; note = 2'-O-methyladenosine-3'-phosphate
  modified_base 15: mod_base = OTHER; note = 2'-O-methyladenosine-3'-phosphate
  modified_base 16: mod_base = OTHER; note = 2'-O-methyluridine-3'-phosphate
  modified_base 17: mod_base = OTHER; note = 2'-O-methyladenosine-3'-phosphate
  modified_base 18: mod_base = OTHER; note = 2'-O-methyladenosine-3'-phosphate
  modified_base 19: mod_base = OTHER; note = 2'-O-methyluridine-3'-phosphate
  modified_base 20: mod_base = OTHER; note = 2'-O-methyluridine-3'-phosphate
  modified_base 21: mod_base = OTHER; note = 2'-O-methyladenosine
gggagtgatgagaaataatta

SEQ ID NO: 4206 - RNA, 21 nt, synthetic construct
  source 1..21: mol_type = other RNA
  modified_base 1: mod_base = OTHER; note = 2'-O-methylguanosine-3'-phosphate
  modified_base 2: mod_base = OTHER; note = 2'-O-methyladenosine-3'-phosphate
  modified_base 3: mod_base = OTHER; note = 2'-O-methylguanosine-3'-phosphate
  modified_base 4: mod_base = OTHER; note = 2'-O-methyluridine-3'-phosphate
  modified_base 5: mod_base = OTHER; note = 2'-O-methylguanosine-3'-phosphate
  modified_base 6: mod_base = OTHER; note = 2'-O-methyladenosine-3'-phosphate
  modified_base 7: mod_base = OTHER; note = 2'-deoxy-2'-fluorouridine-3'-phosphate
  modified_base 8: mod_base = OTHER; note = 2'-O-methylguanosine-3'-phosphate
  modified_base 9: mod_base = OTHER; note = 2'-deoxy-2'-fluoroadenosine-3'-phosphate
  modified_base 10: mod_base = OTHER; note = 2'-deoxy-2'-fluoroguanosine-3'-phosphate
  modified_base 11: mod_base = OTHER; note = 2'-deoxy-2'-fluoroadenosine-3'-phosphate
  modified_base 12: mod_base = OTHER; note = 2'-O-methyladenosine-3'-phosphate
  modified_base 13: mod_base = OTHER; note = 2'-O-methyladenosine-3'-phosphate
  modified_base 14: mod_base = OTHER; note = 2'-O-methyluridine-3'-phosphate
  modified_base 15: mod_base = OTHER; note = 2'-O-methyladenosine-3'-phosphate
  modified_base 16: mod_base = OTHER; note = 2'-O-methyladenosine-3'-phosphate
  modified_base 17: mod_base = OTHER; note = 2'-O-methyluridine-3'-phosphate
  modified_base 18: mod_base = OTHER; note = 2'-O-methyluridine-3'-phosphate
  modified_base 19: mod_base = OTHER; note = 2'-O-methyladenosine-3'-phosphate
  modified_base 20: mod_base = OTHER; note = 2'-O-methyladenosine-3'-phosphate
  modified_base 21: mod_base = OTHER; note = 2'-O-methyladenosine
gagtgatgagaaataattaaa

SEQ ID NO: 4207 - RNA, 21 nt, synthetic construct
  source 1..21: mol_type = other RNA
  modified_base 1: mod_base = OTHER; note = 2'-O-methyladenosine-3'-phosphate
  modified_base 2: mod_base = OTHER; note = 2'-O-methylguanosine-3'-phosphate
  modified_base 3: mod_base = OTHER; note = 2'-O-methyluridine-3'-phosphate
  modified_base 4: mod_base = OTHER; note = 2'-O-methylguanosine-3'-phosphate
  modified_base 5: mod_base = OTHER; note = 2'-O-methyladenosine-3'-phosphate
  modified_base 6: mod_base = OTHER; note = 2'-O-methyluridine-3'-phosphate
  modified_base 7: mod_base = OTHER; note = 2'-deoxy-2'-fluoroguanosine-3'-phosphate
  modified_base 8: mod_base = OTHER; note = 2'-O-methyladenosine-3'-phosphate
  modified_base 9: mod_base = OTHER; note = 2'-deoxy-2'-fluoroguanosine-3'-phosphate
  modified_base 10: mod_base = OTHER; note = 2'-deoxy-2'-fluoroadenosine-3'-phosphate
  modified_base 11: mod_base = OTHER; note = 2'-deoxy-2'-fluoroadenosine-3'-phosphate
  modified_base 12: mod_base = OTHER; note = 2'-O-methyladenosine-3'-phosphate
  modified_base 13: mod_base = OTHER; note = 2'-O-methyluridine-3'-phosphate
  modified_base 14: mod_base = OTHER; note = 2'-O-methyladenosine-3'-phosphate
  modified_base 15: mod_base = OTHER; note = 2'-O-methyladenosine-3'-phosphate
  modified_base 16: mod_base = OTHER; note = 2'-O-methyluridine-3'-phosphate
  modified_base 17: mod_base = OTHER; note = 2'-O-methyluridine-3'-phosphate
  modified_base 18: mod_base = OTHER; note = 2'-O-methyladenosine-3'-phosphate
  modified_base 19: mod_base = OTHER; note = 2'-O-methyladenosine-3'-phosphate
  modified_base 20: mod_base = OTHER; note = 2'-O-methyluridine-3'-phosphate
  modified_base 21: mod_base = OTHER; note = 2'-O-methyladenosine
agtgatgagaaataattaata

SEQ ID NO: 4208 - RNA, 21 nt, synthetic construct
  source 1..21: mol_type = other RNA
  modified_base 1: mod_base = OTHER; note = 2'-O-methylguanosine-3'-phosphate
  modified_base 2: mod_base = OTHER; note = 2'-O-methyluridine-3'-phosphate
  modified_base 3: mod_base = OTHER; note = 2'-O-methylguanosine-3'-phosphate
  modified_base 4: mod_base = OTHER; note = 2'-O-methyladenosine-3'-phosphate
  modified_base 5: mod_base = OTHER; note = 2'-O-methyluridine-3'-phosphate
  modified_base 6: mod_base = OTHER; note = 2'-O-methylguanosine-3'-phosphate
  modified_base 7: mod_base = OTHER; note = 2'-deoxy-2'-fluoroadenosine-3'-phosphate
  modified_base 8: mod_base = OTHER; note = 2'-O-methylguanosine-3'-phosphate
  modified_base 9: mod_base = OTHER; note = 2'-deoxy-2'-fluoroadenosine-3'-phosphate
  modified_base 10: mod_base = OTHER; note = 2'-deoxy-2'-fluoroadenosine-3'-phosphate
  modified_base 11: mod_base = OTHER; note = 2'-deoxy-2'-fluoroadenosine-3'-phosphate
  modified_base 12: mod_base = OTHER; note = 2'-O-methyluridine-3'-phosphate
  modified_base 13: mod_base = OTHER; note = 2'-O-methyladenosine-3'-phosphate
  modified_base 14: mod_base = OTHER; note = 2'-O-methyladenosine-3'-phosphate
  modified_base 15: mod_base = OTHER; note = 2'-O-methyluridine-3'-phosphate
  modified_base 16: mod_base = OTHER; note = 2'-O-methyluridine-3'-phosphate
  modified_base 17: mod_base = OTHER; note = 2'-O-methyladenosine-3'-phosphate
  modified_base 18: mod_base = OTHER; note = 2'-O-methyladenosine-3'-phosphate
  modified_base 19: mod_base = OTHER; note = 2'-O-methyluridine-3'-phosphate
  modified_base 20: mod_base = OTHER; note = 2'-O-methyluridine-3'-phosphate
  modified_base 21: mod_base = OTHER; note = 2'-O-methyladenosine
gtgatgagaaataattaatta

SEQ ID NO: 4209 - RNA, 21 nt, synthetic construct
  source 1..21: mol_type = other RNA
  modified_base 1: mod_base = OTHER; note = 2'-O-methyluridine-3'-phosphate
  modified_base 2: mod_base = OTHER; note = 2'-O-methylguanosine-3'-phosphate
  modified_base 3: mod_base = OTHER; note = 2'-O-methyladenosine-3'-phosphate
  modified_base 4: mod_base = OTHER; note = 2'-O-methyluridine-3'-phosphate
  modified_base 5: mod_base = OTHER; note = 2'-O-methylguanosine-3'-phosphate
  modified_base 6: mod_base = OTHER; note = 2'-O-methyladenosine-3'-phosphate
  modified_base 7: mod_base = OTHER; note = 2'-deoxy-2'-fluoroguanosine-3'-phosphate
  modified_base 8: mod_base = OTHER; note = 2'-O-methyladenosine-3'-phosphate
  modified_base 9: mod_base = OTHER; note = 2'-deoxy-2'-fluoroadenosine-3'-phosphate
  modified_base 10: mod_base = OTHER; note = 2'-deoxy-2'-fluoroadenosine-3'-phosphate
  modified_base 11: mod_base = OTHER; note = 2'-deoxy-2'-fluorouridine-3'-phosphate
  modified_base 12: mod_base = OTHER; note = 2'-O-methyladenosine-3'-phosphate
  modified_base 13: mod_base = OTHER; note = 2'-O-methyladenosine-3'-phosphate
  modified_base 14: mod_base = OTHER; note = 2'-O-methyluridine-3'-phosphate
  modified_base 15: mod_base = OTHER; note = 2'-O-methyluridine-3'-phosphate
  modified_base 16: mod_base = OTHER; note = 2'-O-methyladenosine-3'-phosphate
  modified_base 17: mod_base = OTHER; note = 2'-O-methyladenosine-3'-phosphate
  modified_base 18: mod_base = OTHER; note = 2'-O-methyluridine-3'-phosphate
  modified_base 19: mod_base = OTHER; note = 2'-O-methyluridine-3'-phosphate
  modified_base 20: mod_base = OTHER; note = 2'-O-methylguanosine-3'-phosphate
  modified_base 21: mod_base = OTHER; note = 2'-O-methyladenosine
tgatgagaaataattaattga

SEQ ID NO: 4210 - RNA, 21 nt, synthetic construct
  source 1..21: mol_type = other RNA
  modified_base 1: mod_base = OTHER; note = 2'-O-methylguanosine-3'-phosphate
  modified_base 2: mod_base = OTHER; note = 2'-O-methyladenosine-3'-phosphate
  modified_base 3: mod_base = OTHER; note = 2'-O-methyluridine-3'-phosphate
  modified_base 4: mod_base = OTHER; note = 2'-O-methylguanosine-3'-phosphate
  modified_base 5: mod_base = OTHER; note = 2'-O-methyladenosine-3'-phosphate
  modified_base 6: mod_base = OTHER; note = 2'-O-methylguanosine-3'-phosphate
  modified_base 7: mod_base = OTHER; note = 2'-deoxy-2'-fluoroadenosine-3'-phosphate
  modified_base 8: mod_base = OTHER; note = 2'-O-methyladenosine-3'-phosphate
  modified_base 9: mod_base = OTHER; note = 2'-deoxy-2'-fluoroadenosine-3'-phosphate
  modified_base 10: mod_base = OTHER; note = 2'-deoxy-2'-fluorouridine-3'-phosphate
  modified_base 11: mod_base = OTHER; note = 2'-deoxy-2'-fluoroadenosine-3'-phosphate
  modified_base 12: mod_base = OTHER; note = 2'-O-methyladenosine-3'-phosphate
  modified_base 13: mod_base = OTHER; note = 2'-O-methyluridine-3'-phosphate
  modified_base 14: mod_base = OTHER; note = 2'-O-methyluridine-3'-phosphate
  modified_base 15: mod_base = OTHER; note = 2'-O-methyladenosine-3'-phosphate
  modified_base 16: mod_base = OTHER; note = 2'-O-methyladenosine-3'-phosphate
  modified_base 17: mod_base = OTHER; note = 2'-O-methyluridine-3'-phosphate
  modified_base 18: mod_base = OTHER; note = 2'-O-methyluridine-3'-phosphate
  modified_base 19: mod_base = OTHER; note = 2'-O-methylguanosine-3'-phosphate
  modified_base 20: mod_base = OTHER; note = 2'-O-methylguanosine-3'-phosphate
  modified_base 21: mod_base = OTHER; note = 2'-O-methyladenosine
gatgagaaataattaattgga

SEQ ID NO: 4211 - RNA, 21 nt, synthetic construct
  source 1..21: mol_type = other RNA
  modified_base 1: mod_base = OTHER; note = 2'-O-methyladenosine-3'-phosphate
  modified_base 2: mod_base = OTHER; note = 2'-O-methyluridine-3'-phosphate
  modified_base 3: mod_base = OTHER; note = 2'-O-methylguanosine-3'-phosphate
  modified_base 4: mod_base = OTHER; note = 2'-O-methyladenosine-3'-phosphate
  modified_base 5: mod_base = OTHER; note = 2'-O-methylguanosine-3'-phosphate
  modified_base 6: mod_base = OTHER; note = 2'-O-methyladenosine-3'-phosphate
  modified_base 7: mod_base = OTHER; note = 2'-deoxy-2'-fluoroadenosine-3'-phosphate
  modified_base 8: mod_base = OTHER; note = 2'-O-methyladenosine-3'-phosphate
  modified_base 9: mod_base = OTHER; note = 2'-deoxy-2'-fluorouridine-3'-phosphate
  modified_base 10: mod_base = OTHER; note = 2'-deoxy-2'-fluoroadenosine-3'-phosphate
  modified_base 11: mod_base = OTHER; note = 2'-deoxy-2'-fluoroadenosine-3'-phosphate
  modified_base 12: mod_base = OTHER; note = 2'-O-methyluridine-3'-phosphate
  modified_base 13: mod_base = OTHER; note = 2'-O-methyluridine-3'-phosphate
  modified_base 14: mod_base = OTHER; note = 2'-O-methyladenosine-3'-phosphate
  modified_base 15: mod_base = OTHER; note = 2'-O-methyladenosine-3'-phosphate
  modified_base 16: mod_base = OTHER; note = 2'-O-methyluridine-3'-phosphate
  modified_base 17: mod_base = OTHER; note = 2'-O-methyluridine-3'-phosphate
  modified_base 18: mod_base = OTHER; note = 2'-O-methylguanosine-3'-phosphate
  modified_base 19: mod_base = OTHER; note = 2'-O-methylguanosine-3'-phosphate
  modified_base 20: mod_base = OTHER; note = 2'-O-methyladenosine-3'-phosphate
  modified_base 21: mod_base = OTHER; note = 2'-O-methyladenosine
atgagaaataattaattggaa

SEQ ID NO: 4212 - RNA, 21 nt, synthetic construct
  source 1..21: mol_type = other RNA
  modified_base 1: mod_base = OTHER; note = 2'-O-methyluridine-3'-phosphate
  modified_base 2: mod_base = OTHER; note = 2'-O-methylguanosine-3'-phosphate
  modified_base 3: mod_base = OTHER; note = 2'-O-methylguanosine-3'-phosphate
  modified_base 4: mod_base = OTHER; note = 2'-O-methyladenosine-3'-phosphate
  modified_base 5: mod_base = OTHER; note = 2'-O-methylcytidine-3'-phosphate
  modified_base 6: mod_base = OTHER; note = 2'-O-methylguanosine-3'-phosphate
  modified_base 7: mod_base = OTHER; note = 2'-deoxy-2'-fluoroguanosine-3'-phosphate
  modified_base 8: mod_base = OTHER; note = 2'-O-methylguanosine-3'-phosphate
  modified_base 9: mod_base = OTHER; note = 2'-deoxy-2'-fluoroadenosine-3'-phosphate
  modified_base 10: mod_base = OTHER; note = 2'-deoxy-2'-fluoroguanosine-3'-phosphate
  modified_base 11: mod_base = OTHER; note = 2'-deoxy-2'-fluoroadenosine-3'-phosphate
  modified_base 12: mod_base = OTHER; note = 2'-O-methylcytidine-3'-phosphate
  modified_base 13: mod_base = OTHER; note = 2'-O-methyladenosine-3'-phosphate
  modified_base 14: mod_base = OTHER; note = 2'-O-methylguanosine-3'-phosphate
  modified_base 15: mod_base = OTHER; note = 2'-O-methyladenosine-3'-phosphate
  modified_base 16: mod_base = OTHER; note = 2'-O-methylguanosine-3'-phosphate
  modified_base 17: mod_base = OTHER; note = 2'-O-methyluridine-3'-phosphate
  modified_base 18: mod_base = OTHER; note = 2'-O-methylguanosine-3'-phosphate
  modified_base 19: mod_base = OTHER; note = 2'-O-methyladenosine-3'-phosphate
  modified_base 20: mod_base = OTHER; note = 2'-O-methylcytidine-3'-phosphate
  modified_base 21: mod_base = OTHER; note = 2'-O-methyladenosine
tggacgggagacagagtgaca

SEQ ID NO: 4213 - RNA, 21 nt, synthetic construct
  source 1..21: mol_type = other RNA
  modified_base 1: mod_base = OTHER; note = 2'-O-methylguanosine-3'-phosphate
  modified_base 2: mod_base = OTHER; note = 2'-O-methylguanosine-3'-phosphate
  modified_base 3: mod_base = OTHER; note = 2'-O-methyladenosine-3'-phosphate
  modified_base 4: mod_base = OTHER; note = 2'-O-methylcytidine-3'-phosphate
  modified_base 5: mod_base = OTHER; note = 2'-O-methylguanosine-3'-phosphate
  modified_base 6: mod_base = OTHER; note = 2'-O-methylguanosine-3'-phosphate
  modified_base 7: mod_base = OTHER; note = 2'-deoxy-2'-fluoroguanosine-3'-phosphate
  modified_base 8: mod_base = OTHER; note = 2'-O-methyladenosine-3'-phosphate
  modified_base 9: mod_base = OTHER; note = 2'-deoxy-2'-fluoroguanosine-3'-phosphate
  modified_base 10: mod_base = OTHER; note = 2'-deoxy-2'-fluoroadenosine-3'-phosphate
  modified_base 11: mod_base = OTHER; note = 2'-deoxy-2'-fluorocytidine-3'-phosphate
  modified_base 12: mod_base = OTHER; note = 2'-O-methyladenosine-3'-phosphate
  modified_base 13: mod_base = OTHER; note = 2'-O-methylguanosine-3'-phosphate
  modified_base 14: mod_base = OTHER; note = 2'-O-methyladenosine-3'-phosphate
  modified_base 15: mod_base = OTHER; note = 2'-O-methylguanosine-3'-phosphate
  modified_base 16: mod_base = OTHER; note = 2'-O-methyluridine-3'-phosphate
  modified_base 17: mod_base = OTHER; note = 2'-O-methylguanosine-3'-phosphate
  modified_base 18: mod_base = OTHER; note = 2'-O-methyladenosine-3'-phosphate
  modified_base 19: mod_base = OTHER; note = 2'-O-methylcytidine-3'-phosphate
  modified_base 20: mod_base = OTHER; note = 2'-O-methylguanosine-3'-phosphate
  modified_base 21: mod_base = OTHER; note = 2'-O-methyladenosine
ggacgggagacagagtgacga

SEQ ID NO: 4214 - RNA, 21 nt, synthetic construct
  source 1..21: mol_type = other RNA
  modified_base 1: mod_base = OTHER; note = 2'-O-methylguanosine-3'-phosphate
  modified_base 2: mod_base = OTHER; note = 2'-O-methyladenosine-3'-phosphate
  modified_base 3: mod_base = OTHER; note = 2'-O-methylcytidine-3'-phosphate
  modified_base 4: mod_base = OTHER; note = 2'-O-methylguanosine-3'-phosphate
  modified_base 5: mod_base = OTHER; note = 2'-O-methylguanosine-3'-phosphate
  modified_base 6: mod_base = OTHER; note = 2'-O-methylguanosine-3'-phosphate
  modified_base 7: mod_base = OTHER; note = 2'-deoxy-2'-fluoroadenosine-3'-phosphate
  modified_base 8: mod_base = OTHER; note = 2'-O-methylguanosine-3'-phosphate
  modified_base 9: mod_base = OTHER; note = 2'-deoxy-2'-fluoroadenosine-3'-phosphate
  modified_base 10: mod_base = OTHER; note = 2'-deoxy-2'-fluorocytidine-3'-phosphate
  modified_base 11: mod_base = OTHER; note = 2'-deoxy-2'-fluoroadenosine-3'-phosphate
  modified_base 12: mod_base = OTHER; note = 2'-O-methylguanosine-3'-phosphate
  modified_base 13: mod_base = OTHER; note = 2'-O-methyladenosine-3'-phosphate
  modified_base 14: mod_base = OTHER; note = 2'-O-methylguanosine-3'-phosphate
  modified_base 15: mod_base = OTHER; note = 2'-O-methyluridine-3'-phosphate
  modified_base 16: mod_base = OTHER; note = 2'-O-methylguanosine-3'-phosphate
  modified_base 17: mod_base = OTHER; note = 2'-O-methyladenosine-3'-phosphate
  modified_base 18: mod_base = OTHER; note = 2'-O-methylcytidine-3'-phosphate
  modified_base 19: mod_base = OTHER; note = 2'-O-methylguanosine-3'-phosphate
  modified_base 20: mod_base = OTHER; note = 2'-O-methylcytidine-3'-phosphate
  modified_base 21: mod_base = OTHER; note = 2'-O-methyladenosine
gacgggagacagagtgacgca

SEQ ID NO: 4215 - RNA, 21 nt, synthetic construct
  source 1..21: mol_type = other RNA
  modified_base 1: mod_base = OTHER; note = 2'-O-methyladenosine-3'-phosphate
  modified_base 2: mod_base = OTHER; note = 2'-O-methylcytidine-3'-phosphate
  modified_base 3: mod_base = OTHER; note = 2'-O-methylguanosine-3'-phosphate
  modified_base 4: mod_base = OTHER; note = 2'-O-methylguanosine-3'-phosphate
  modified_base 5: mod_base = OTHER; note = 2'-O-methylguanosine-3'-phosphate
  modified_base 6: mod_base = OTHER; note = 2'-O-methyladenosine-3'-phosphate
  modified_base 7: mod_base = OTHER; note = 2'-deoxy-2'-fluoroguanosine-3'-phosphate
  modified_base 8: mod_base = OTHER; note = 2'-O-methyladenosine-3'-phosphate
  modified_base 9: mod_base = OTHER; note = 2'-deoxy-2'-fluorocytidine-3'-phosphate
  modified_base 10: mod_base = OTHER; note = 2'-deoxy-2'-fluoroadenosine-3'-phosphate
  modified_base 11: mod_base = OTHER; note = 2'-deoxy-2'-fluoroguanosine-3'-phosphate
  modified_base 12: mod_base = OTHER; note = 2'-O-methyladenosine-3'-phosphate
  modified_base 13: mod_base = OTHER; note = 2'-O-methylguanosine-3'-phosphate
  modified_base 14: mod_base = OTHER; note = 2'-O-methyluridine-3'-phosphate
  modified_base 15: mod_base = OTHER; note = 2'-O-methylguanosine-3'-phosphate
  modified_base 16: mod_base = OTHER; note = 2'-O-methyladenosine-3'-phosphate
  modified_base 17: mod_base = OTHER; note = 2'-O-methylcytidine-3'-phosphate
  modified_base 18: mod_base = OTHER; note = 2'-O-methylguanosine-3'-phosphate
  modified_base 19: mod_base = OTHER; note = 2'-O-methylcytidine-3'-phosphate
  modified_base 20: mod_base = OTHER; note = 2'-O-methyladenosine-3'-phosphate
  modified_base 21: mod_base = OTHER; note = 2'-O-methyladenosine
acgggagacagagtgacgcaa

SEQ ID NO: 4216 - RNA, 21 nt, synthetic construct
  source 1..21: mol_type = other RNA
  modified_base 1: mod_base = OTHER; note = 2'-O-methyladenosine-3'-phosphate
  modified_base 2: mod_base = OTHER; note = 2'-O-methylguanosine-3'-phosphate
  modified_base 3: mod_base = OTHER; note = 2'-O-methyladenosine-3'-phosphate
  modified_base 4: mod_base = OTHER; note = 2'-O-methylcytidine-3'-phosphate
  modified_base 5: mod_base = OTHER; note = 2'-O-methyladenosine-3'-phosphate
  modified_base 6: mod_base = OTHER; note = 2'-O-methylguanosine-3'-phosphate
  modified_base 7: mod_base = OTHER; note = 2'-deoxy-2'-fluoroadenosine-3'-phosphate
  modified_base 8: mod_base = OTHER; note = 2'-O-methylguanosine-3'-phosphate
  modified_base 9: mod_base = OTHER; note = 2'-deoxy-2'-fluorouridine-3'-phosphate
  modified_base 10: mod_base = OTHER; note = 2'-deoxy-2'-fluoroguanosine-3'-phosphate
  modified_base 11: mod_base = OTHER; note = 2'-deoxy-2'-fluoroadenosine-3'-phosphate
  modified_base 12: mod_base = OTHER; note = 2'-O-methylcytidine-3'-phosphate
  modified_base 13: mod_base = OTHER; note = 2'-O-methylguanosine-3'-phosphate
  modified_base 14: mod_base = OTHER; note = 2'-O-methylcytidine-3'-phosphate
  modified_base 15: mod_base = OTHER; note = 2'-O-methyladenosine-3'-phosphate
  modified_base 16: mod_base = OTHER; note = 2'-O-methylcytidine-3'-phosphate
  modified_base 17: mod_base = OTHER; note = 2'-O-methyluridine-3'-phosphate
  modified_base 18: mod_base = OTHER; note = 2'-O-methylguanosine-3'-phosphate
  modified_base 19: mod_base = OTHER; note = 2'-O-methyladenosine-3'-phosphate
  modified_base 20: mod_base = OTHER; note = 2'-O-methylcytidine-3'-phosphate
  modified_base 21: mod_base = OTHER; note = 2'-O-methyladenosine
agacagagtgacgcactgaca

SEQ ID NO: 4217 - RNA, 21 nt, synthetic construct
  source 1..21: mol_type = other RNA
  modified_base 1: mod_base = OTHER; note = 2'-O-methyladenosine-3'-phosphate
  modified_base 2: mod_base = OTHER; note = 2'-O-methylcytidine-3'-phosphate
  modified_base 3: mod_base = OTHER; note = 2'-O-methyladenosine-3'-phosphate
  modified_base 4: mod_base = OTHER; note = 2'-O-methylguanosine-3'-phosphate
  modified_base 5: mod_base = OTHER; note = 2'-O-methyladenosine-3'-phosphate
  modified_base 6: mod_base = OTHER; note = 2'-O-methylguanosine-3'-phosphate
  modified_base 7: mod_base = OTHER; note = 2'-deoxy-2'-fluorouridine-3'-phosphate
  modified_base 8: mod_base = OTHER; note = 2'-O-methylguanosine-3'-phosphate
  modified_base 9: mod_base = OTHER; note = 2'-deoxy-2'-fluoroadenosine-3'-phosphate
  modified_base 10: mod_base = OTHER; note = 2'-deoxy-2'-fluorocytidine-3'-phosphate
  modified_base 11: mod_base = OTHER; note = 2'-deoxy-2'-fluoroguanosine-3'-phosphate
  modified_base 12: mod_base = OTHER; note = 2'-O-methylcytidine-3'-phosphate
  modified_base 13: mod_base = OTHER; note = 2'-O-methyladenosine-3'-phosphate
  modified_base 14: mod_base = OTHER; note = 2'-O-methylcytidine-3'-phosphate
  modified_base 15: mod_base = OTHER; note = 2'-O-methyluridine-3'-phosphate
  modified_base 16: mod_base = OTHER; note = 2'-O-methylguanosine-3'-phosphate
  modified_base 17: mod_base = OTHER; note = 2'-O-methyladenosine-3'-phosphate
  modified_base 18: mod_base = OTHER; note = 2'-O-methylcytidine-3'-phosphate
  modified_base 19: mod_base = OTHER; note = 2'-O-methyluridine-3'-phosphate
  modified_base 20: mod_base = OTHER; note = 2'-O-methylcytidine-3'-phosphate
  modified_base 21: mod_base = OTHER; note = 2'-O-methyladenosine
acagagtgacgcactgactca

SEQ ID NO: 4218 - RNA, 21 nt, synthetic construct
  source 1..21: mol_type = other RNA
  modified_base 1: mod_base = OTHER; note = 2'-O-methyladenosine-3'-phosphate
  modified_base 2: mod_base = OTHER; note = 2'-O-methylguanosine-3'-phosphate
  modified_base 3: mod_base = OTHER; note = 2'-O-methyladenosine-3'-phosphate
  modified_base 4: mod_base = OTHER; note = 2'-O-methylguanosine-3'-phosphate
  modified_base 5: mod_base = OTHER; note = 2'-O-methyluridine-3'-phosphate
  modified_base 6: mod_base = OTHER; note = 2'-O-methylguanosine-3'-phosphate
  modified_base 7: mod_base = OTHER; note = 2'-deoxy-2'-fluoroadenosine-3'-phosphate
  modified_base 8: mod_base = OTHER; note = 2'-O-methylcytidine-3'-phosphate
  modified_base 9: mod_base = OTHER; note = 2'-deoxy-2'-fluoroguanosine-3'-phosphate
  modified_base 10: mod_base = OTHER; note = 2'-deoxy-2'-fluorocytidine-3'-phosphate
  modified_base 11: mod_base = OTHER; note = 2'-deoxy-2'-fluoroadenosine-3'-phosphate
  modified_base 12: mod_base = OTHER; note = 2'-O-methylcytidine-3'-phosphate
  modified_base 13: mod_base = OTHER; note = 2'-O-methyluridine-3'-phosphate
  modified_base 14: mod_base = OTHER; note = 2'-O-methylguanosine-3'-phosphate
  modified_base 15: mod_base = OTHER; note = 2'-O-methyladenosine-3'-phosphate
  modified_base 16: mod_base = OTHER; note = 2'-O-methylcytidine-3'-phosphate
  modified_base 17: mod_base = OTHER; note = 2'-O-methyluridine-3'-phosphate
  modified_base 18: mod_base = OTHER; note = 2'-O-methylcytidine-3'-phosphate
  modified_base 19: mod_base = OTHER; note = 2'-O-methyladenosine-3'-phosphate
  modified_base 20: mod_base = OTHER; note = 2'-O-methylcytidine-3'-phosphate
  modified_base 21: mod_base = OTHER; note = 2'-O-methyladenosine
agagtgacgcactgactcaca

SEQ ID NO: 4219 - RNA, 21 nt, synthetic construct
  source 1..21: mol_type = other RNA
  modified_base 1: mod_base = OTHER; note = 2'-O-methylguanosine-3'-phosphate
  modified_base 2: mod_base = OTHER; note = 2'-O-methyladenosine-3'-phosphate
  modified_base 3: mod_base = OTHER; note = 2'-O-methylguanosine-3'-phosphate
  modified_base 4: mod_base = OTHER; note = 2'-O-methyluridine-3'-phosphate
  modified_base 5: mod_base = OTHER; note = 2'-O-methylguanosine-3'-phosphate
  modified_base 6: mod_base = OTHER; note = 2'-O-methyladenosine-3'-phosphate
  modified_base 7: mod_base = OTHER; note = 2'-deoxy-2'-fluorocytidine-3'-phosphate
  modified_base 8: mod_base = OTHER; note = 2'-O-methylguanosine-3'-phosphate
  modified_base 9: mod_base = OTHER; note = 2'-deoxy-2'-fluorocytidine-3'-phosphate
  modified_base 10: mod_base = OTHER; note = 2'-deoxy-2'-fluoroadenosine-3'-phosphate
  modified_base 11: mod_base = OTHER; note = 2'-deoxy-2'-fluorocytidine-3'-phosphate
  modified_base 12: mod_base = OTHER; note = 2'-O-methyluridine-3'-phosphate
  modified_base 13: mod_base = OTHER; note = 2'-O-methylguanosine-3'-phosphate
  modified_base 14: mod_base = OTHER; note = 2'-O-methyladenosine-3'-phosphate
  modified_base 15: mod_base = OTHER; note = 2'-O-methylcytidine-3'-phosphate
  modified_base 16: mod_base = OTHER; note = 2'-O-methyluridine-3'-phosphate
  modified_base 17: mod_base = OTHER; note = 2'-O-methylcytidine-3'-phosphate
  modified_base 18: mod_base = OTHER; note = 2'-O-methyladenosine-3'-phosphate
  modified_base 19: mod_base = OTHER; note = 2'-O-methylcytidine-3'-phosphate
  modified_base 20: mod_base = OTHER; note = 2'-O-methylcytidine-3'-phosphate
  modified_base 21: mod_base = OTHER; note = 2'-O-methyladenosine
gagtgacgcactgactcacca

SEQ ID NO: 4220 - RNA, 21 nt, synthetic construct
  source 1..21: mol_type = other RNA
  modified_base 1: mod_base = OTHER; note = 2'-O-methyladenosine-3'-phosphate
  modified_base 2: mod_base = OTHER; note = 2'-O-methylguanosine-3'-phosphate
  modified_base 3: mod_base = OTHER; note = 2'-O-methyluridine-3'-phosphate
  modified_base 4: mod_base = OTHER; note = 2'-O-methylguanosine-3'-phosphate
  modified_base 5: mod_base = OTHER; note = 2'-O-methyladenosine-3'-phosphate
  modified_base 6: mod_base = OTHER; note = 2'-O-methylcytidine-3'-phosphate
  modified_base 7: mod_base = OTHER; note = 2'-deoxy-2'-fluoroguanosine-3'-phosphate
  modified_base 8: mod_base = OTHER; note = 2'-O-methylcytidine-3'-phosphate
  modified_base 9: mod_base = OTHER; note = 2'-deoxy-2'-fluoroadenosine-3'-phosphate
  modified_base 10: mod_base = OTHER; note = 2'-deoxy-2'-fluorocytidine-3'-phosphate
  modified_base 11: mod_base = OTHER; note = 2'-deoxy-2'-fluorouridine-3'-phosphate
  modified_base 12: mod_base = OTHER; note = 2'-O-methylguanosine-3'-phosphate
  modified_base 13: mod_base = OTHER; note = 2'-O-methyladenosine-3'-phosphate
  modified_base 14: mod_base = OTHER; note = 2'-O-methylcytidine-3'-phosphate
  modified_base 15: mod_base = OTHER; note = 2'-O-methyluridine-3'-phosphate
  modified_base 16: mod_base = OTHER; note = 2'-O-methylcytidine-3'-phosphate
  modified_base 17: mod_base = OTHER; note = 2'-O-methyladenosine-3'-phosphate
  modified_base 18: mod_base = OTHER; note = 2'-O-methylcytidine-3'-phosphate
  modified_base 19: mod_base = OTHER; note = 2'-O-methylcytidine-3'-phosphate
  modified_base 20: mod_base = OTHER; note = 2'-O-methyluridine-3'-phosphate
  modified_base 21: mod_base = OTHER; note = 2'-O-methyladenosine
agtgacgcactgactcaccta

SEQ ID NO: 4221 - RNA, 21 nt, synthetic construct
  source 1..21: mol_type = other RNA
  modified_base 1: mod_base = OTHER; note = 2'-O-methyluridine-3'-phosphate
  modified_base 2: mod_base = OTHER; note = 2'-O-methylguanosine-3'-phosphate
  modified_base 3: mod_base = OTHER; note = 2'-O-methyladenosine-3'-phosphate
  modified_base 4: mod_base = OTHER; note = 2'-O-methylcytidine-3'-phosphate
  modified_base 5: mod_base = OTHER; note = 2'-O-methylguanosine-3'-phosphate
  modified_base 6: mod_base = OTHER; note = 2'-O-methylcytidine-3'-phosphate
  modified_base 7: mod_base = OTHER; note = 2'-deoxy-2'-fluoroadenosine-3'-phosphate
  modified_base 8: mod_base = OTHER; note = 2'-O-methylcytidine-3'-phosphate
  modified_base 9: mod_base = OTHER; note = 2'-deoxy-2'-fluorouridine-3'-phosphate
  modified_base 10: mod_base = OTHER; note = 2'-deoxy-2'-fluoroguanosine-3'-phosphate
  modified_base 11: mod_base = OTHER; note = 2'-deoxy-2'-fluoroadenosine-3'-phosphate
  modified_base 12: mod_base = OTHER; note = 2'-O-methylcytidine-3'-phosphate
  modified_base 13: mod_base = OTHER; note = 2'-O-methyluridine-3'-phosphate
  modified_base 14: mod_base = OTHER; note = 2'-O-methylcytidine-3'-phosphate
  modified_base 15: mod_base = OTHER; note = 2'-O-methyladenosine-3'-phosphate
  modified_base 16: mod_base = OTHER; note = 2'-O-methylcytidine-3'-phosphate
  modified_base 17: mod_base = OTHER; note = 2'-O-methylcytidine-3'-phosphate
  modified_base 18: mod_base = OTHER; note = 2'-O-methyluridine-3'-phosphate
  modified_base 19: mod_base = OTHER; note = 2'-O-methyladenosine-3'-phosphate
  modified_base 20: mod_base = OTHER; note = 2'-O-methylguanosine-3'-phosphate
  modified_base 21: mod_base = OTHER; note = 2'-O-methyladenosine
tgacgcactgactcacctaga

SEQ ID NO: 4222 - RNA, 21 nt, synthetic construct
  source 1..21: mol_type = other RNA
  modified_base 1: mod_base = OTHER; note = 2'-O-methylguanosine-3'-phosphate
  modified_base 2: mod_base = OTHER; note = 2'-O-methyladenosine-3'-phosphate
  modified_base 3: mod_base = OTHER; note = 2'-O-methylcytidine-3'-phosphate
  modified_base 4: mod_base = OTHER; note = 2'-O-methylguanosine-3'-phosphate
  modified_base 5: mod_base = OTHER; note = 2'-O-methylcytidine-3'-phosphate
  modified_base 6: mod_base = OTHER; note = 2'-O-methyladenosine-3'-phosphate
  modified_base 7: mod_base = OTHER; note = 2'-deoxy-2'-fluorocytidine-3'-phosphate
  modified_base 8: mod_base = OTHER; note = 2'-O-methyluridine-3'-phosphate
  modified_base 9: mod_base = OTHER; note = 2'-deoxy-2'-fluoroguanosine-3'-phosphate
  modified_base 10: mod_base = OTHER; note = 2'-deoxy-2'-fluoroadenosine-3'-phosphate
  modified_base 11: mod_base = OTHER; note = 2'-deoxy-2'-fluorocytidine-3'-phosphate
  modified_base 12: mod_base = OTHER; note = 2'-O-methyluridine-3'-phosphate
  modified_base 13: mod_base = OTHER; note = 2'-O-methylcytidine-3'-phosphate
  modified_base 14: mod_base = OTHER; note = 2'-O-methyladenosine-3'-phosphate
  modified_base 15: mod_base = OTHER; note = 2'-O-methylcytidine-3'-phosphate
  modified_base 16: mod_base = OTHER; note = 2'-O-methylcytidine-3'-phosphate
  modified_base 17: mod_base = OTHER; note = 2'-O-methyluridine-3'-phosphate
  modified_base 18: mod_base = OTHER; note = 2'-O-methyladenosine-3'-phosphate
  modified_base 19: mod_base = OTHER; note = 2'-O-methylguanosine-3'-phosphate
  modified_base 20: mod_base = OTHER; note = 2'-O-methyladenosine-3'-phosphate
  modified_base 21: mod_base = OTHER; note = 2'-O-methyladenosine
gacgcactgactcacctagaa

SEQ ID NO: 4223 - RNA, 21 nt, synthetic construct
  source 1..21: mol_type = other RNA
  modified_base 1: mod_base = OTHER; note = 2'-O-methyladenosine-3'-phosphate
  modified_base 2: mod_base = OTHER; note = 2'-O-methylcytidine-3'-phosphate
  modified_base 3: mod_base = OTHER; note = 2'-O-methylguanosine-3'-phosphate
  modified_base 4: mod_base = OTHER; note = 2'-O-methylcytidine-3'-phosphate
  modified_base 5: mod_base = OTHER; note = 2'-O-methyladenosine-3'-phosphate
  modified_base 6: mod_base = OTHER; note = 2'-O-methylcytidine-3'-phosphate
  modified_base 7: mod_base = OTHER; note = 2'-deoxy-2'-fluorouridine-3'-phosphate
  modified_base 8: mod_base = OTHER; note = 2'-O-methylguanosine-3'-phosphate
  modified_base 9: mod_base = OTHER; note = 2'-deoxy-2'-fluoroadenosine-3'-phosphate
  modified_base 10: mod_base = OTHER; note = 2'-deoxy-2'-fluorocytidine-3'-phosphate
  modified_base 11: mod_base = OTHER; note = 2'-deoxy-2'-fluorouridine-3'-phosphate
  modified_base 12: mod_base = OTHER; note = 2'-O-methylcytidine-3'-phosphate
  modified_base 13: mod_base = OTHER; note = 2'-O-methyladenosine-3'-phosphate
  modified_base 14: mod_base = OTHER; note = 2'-O-methylcytidine-3'-phosphate
  modified_base 15: mod_base = OTHER; note = 2'-O-methylcytidine-3'-phosphate
  modified_base 16: mod_base = OTHER; note = 2'-O-methyluridine-3'-phosphate
  modified_base 17: mod_base = OTHER; note = 2'-O-methyladenosine-3'-phosphate
  modified_base 18: mod_base = OTHER; note = 2'-O-methylguanosine-3'-phosphate
  modified_base 19: mod_base = OTHER; note = 2'-O-methyladenosine-3'-phosphate
  modified_base 20: mod_base = OTHER; note = 2'-O-methylguanosine-3'-phosphate
  modified_base 21: mod_base = OTHER; note = 2'-O-methyladenosine
acgcactgactcacctagaga

SEQ ID NO: 4224 - RNA, 21 nt, synthetic construct
  source 1..21: mol_type = other RNA
  modified_base 1: mod_base = OTHER; note = 2'-O-methylcytidine-3'-phosphate
  modified_base 2: mod_base = OTHER; note = 2'-O-methylguanosine-3'-phosphate
  modified_base 3: mod_base = OTHER; note = 2'-O-methylcytidine-3'-phosphate
  modified_base 4: mod_base = OTHER; note = 2'-O-methyladenosine-3'-phosphate
  modified_base 5: mod_base = OTHER; note = 2'-O-methylcytidine-3'-phosphate
  modified_base 6: mod_base = OTHER; note = 2'-O-methyluridine-3'-phosphate
  modified_base 7: mod_base = OTHER; note = 2'-deoxy-2'-fluoroguanosine-3'-phosphate
  modified_base 8: mod_base = OTHER; note = 2'-O-methyladenosine-3'-phosphate
  modified_base 9: mod_base = OTHER; note = 2'-deoxy-2'-fluorocytidine-3'-phosphate
  modified_base 10: mod_base = OTHER; note = 2'-deoxy-2'-fluorouridine-3'-phosphate
  modified_base 11: mod_base = OTHER; note = 2'-deoxy-2'-fluorocytidine-3'-phosphate
  modified_base 12: mod_base = OTHER; note = 2'-O-methyladenosine-3'-phosphate
  modified_base 13: mod_base = OTHER; note = 2'-O-methylcytidine-3'-phosphate
  modified_base 14: mod_base = OTHER; note = 2'-O-methylcytidine-3'-phosphate
  modified_base 15: mod_base = OTHER; note = 2'-O-methyluridine-3'-phosphate
  modified_base 16: mod_base = OTHER; note = 2'-O-methyladenosine-3'-phosphate
  modified_base 17: mod_base = OTHER; note = 2'-O-methylguanosine-3'-phosphate
  modified_base 18: mod_base = OTHER; note = 2'-O-methyladenosine-3'-phosphate
  modified_base 19: mod_base = OTHER; note = 2'-O-methylguanosine-3'-phosphate
  modified_base 20: mod_base = OTHER; note = 2'-O-methylguanosine-3'-phosphate
  modified_base 21: mod_base = OTHER; note = 2'-O-methyladenosine
cgcactgactcacctagagga

SEQ ID NO: 4225 - RNA, 21 nt, synthetic construct
  source 1..21: mol_type = other RNA
  modified_base 1: mod_base = OTHER; note = 2'-O-methylguanosine-3'-phosphate
  modified_base 2: mod_base = OTHER; note = 2'-O-methylcytidine-3'-phosphate
  modified_base 3: mod_base = OTHER; note = 2'-O-methyladenosine-3'-phosphate
  modified_base 4: mod_base = OTHER; note = 2'-O-methylcytidine-3'-phosphate
  modified_base 5: mod_base = OTHER; note = 2'-O-methyluridine-3'-phosphate
  modified_base 6: mod_base = OTHER; note = 2'-O-methylguanosine-3'-phosphate
  modified_base 7: mod_base = OTHER; note = 2'-deoxy-2'-fluoroadenosine-3'-phosphate
  modified_base 8: mod_base = OTHER; note = 2'-O-methylcytidine-3'-phosphate
  modified_base 9: mod_base = OTHER; note = 2'-deoxy-2'-fluorouridine-3'-phosphate
  modified_base 10: mod_base = OTHER; note = 2'-deoxy-2'-fluorocytidine-3'-phosphate
  modified_base 11: mod_base = OTHER; note = 2'-deoxy-2'-fluoroadenosine-3'-phosphate
  modified_base 12: mod_base = OTHER; note = 2'-O-methylcytidine-3'-phosphate
  modified_base 13: mod_base = OTHER; note = 2'-O-methylcytidine-3'-phosphate
  modified_base 14: mod_base = OTHER; note = 2'-O-methyluridine-3'-phosphate
  modified_base 15: mod_base = OTHER; note = 2'-O-methyladenosine-3'-phosphate
  modified_base 16: mod_base = OTHER; note = 2'-O-methylguanosine-3'-phosphate
  modified_base 17: mod_base = OTHER; note = 2'-O-methyladenosine-3'-phosphate
  modified_base 18: mod_base = OTHER; note = 2'-O-methylguanosine-3'-phosphate
  modified_base 19: mod_base = OTHER; note = 2'-O-methylguanosine-3'-phosphate
  modified_base 20: mod_base = OTHER; note = 2'-O-methylcytidine-3'-phosphate
  modified_base 21: mod_base = OTHER; note = 2'-O-methyladenosine
gcactgactcacctagaggca

SEQ ID NO: 4226 - RNA, 21 nt, synthetic construct
  source 1..21: mol_type = other RNA
  modified_base 1: mod_base = OTHER; note = 2'-O-methylcytidine-3'-phosphate
  modified_base 2: mod_base = OTHER; note = 2'-O-methyladenosine-3'-phosphate
  modified_base 3: mod_base = OTHER; note = 2'-O-methylcytidine-3'-phosphate
  modified_base 4: mod_base = OTHER; note = 2'-O-methyluridine-3'-phosphate
  modified_base 5: mod_base = OTHER; note = 2'-O-methylguanosine-3'-phosphate
  modified_base 6: mod_base = OTHER; note = 2'-O-methyladenosine-3'-phosphate
  modified_base 7: mod_base = OTHER; note = 2'-deoxy-2'-fluorocytidine-3'-phosphate
  modified_base 8: mod_base = OTHER; note = 2'-O-methyluridine-3'-phosphate
  modified_base 9: mod_base = OTHER; note = 2'-deoxy-2'-fluorocytidine-3'-phosphate
  modified_base 10: mod_base = OTHER; note = 2'-deoxy-2'-fluoroadenosine-3'-phosphate
  modified_base 11: mod_base = OTHER; note = 2'-deoxy-2'-fluorocytidine-3'-phosphate
  modified_base 12: mod_base = OTHER; note = 2'-O-methylcytidine-3'-phosphate
  modified_base 13: mod_base = OTHER; note = 2'-O-methyluridine-3'-phosphate
  modified_base 14: mod_base = OTHER; note = 2'-O-methyladenosine-3'-phosphate
  modified_base 15: mod_base = OTHER; note = 2'-O-methylguanosine-3'-phosphate
  modified_base 16: mod_base = OTHER; note = 2'-O-methyladenosine-3'-phosphate
  modified_base 17: mod_base = OTHER; note = 2'-O-methylguanosine-3'-phosphate
  modified_base 18: mod_base = OTHER; note = 2'-O-methylguanosine-3'-phosphate
  modified_base 19: mod_base = OTHER; note = 2'-O-methylcytidine-3'-phosphate
  modified_base 20: mod_base = OTHER; note = 2'-O-methyluridine-3'-phosphate
  modified_base 21: mod_base = OTHER; note = 2'-O-methyladenosine
cactgactcacctagaggcta

SEQ ID NO: 4227 - RNA, 21 nt, synthetic construct
  source 1..21: mol_type = other RNA
  modified_base 1: mod_base = OTHER; note = 2'-O-methyladenosine-3'-phosphate
  modified_base 2: mod_base = OTHER; note = 2'-O-methylcytidine-3'-phosphate
  modified_base 3: mod_base = OTHER; note = 2'-O-methyluridine-3'-phosphate
  modified_base 4: mod_base = OTHER; note = 2'-O-methylguanosine-3'-phosphate
  modified_base 5: mod_base = OTHER; note = 2'-O-methyladenosine-3'-phosphate
  modified_base 6: mod_base = OTHER; note = 2'-O-methylcytidine-3'-phosphate
  modified_base 7: mod_base = OTHER; note = 2'-deoxy-2'-fluorouridine-3'-phosphate
  modified_base 8: mod_base = OTHER; note = 2'-O-methylcytidine-3'-phosphate
  modified_base 9: mod_base = OTHER; note = 2'-deoxy-2'-fluoroadenosine-3'-phosphate
  modified_base 10: mod_base = OTHER; note = 2'-deoxy-2'-fluorocytidine-3'-phosphate
  modified_base 11: mod_base = OTHER; note = 2'-deoxy-2'-fluorocytidine-3'-phosphate
  modified_base 12: mod_base = OTHER; note = 2'-O-methyluridine-3'-phosphate
  modified_base 13: mod_base = OTHER; note = 2'-O-methyladenosine-3'-phosphate
  modified_base 14: mod_base = OTHER; note = 2'-O-methylguanosine-3'-phosphate
  modified_base 15: mod_base = OTHER; note = 2'-O-methyladenosine-3'-phosphate
  modified_base 16: mod_base = OTHER; note = 2'-O-methylguanosine-3'-phosphate
  modified_base 17: mod_base = OTHER; note = 2'-O-methylguanosine-3'-phosphate
  modified_base 18: mod_base = OTHER; note = 2'-O-methylcytidine-3'-phosphate
  modified_base 19: mod_base = OTHER; note = 2'-O-methyluridine-3'-phosphate
  modified_base 20: mod_base = OTHER; note = 2'-O-methylguanosine-3'-phosphate
  modified_base 21: mod_base = OTHER; note = 2'-O-methyladenosine
actgactcacctagaggctga

SEQ ID NO: 4228 - RNA, 21 nt, synthetic construct
  source 1..21: mol_type = other RNA
  modified_base 1: mod_base = OTHER; note = 2'-O-methylguanosine-3'-phosphate
  modified_base 2: mod_base = OTHER; note = 2'-O-methyladenosine-3'-phosphate
  modified_base 3: mod_base = OTHER; note = 2'-O-methyladenosine-3'-phosphate
  modified_base 4: mod_base = OTHER; note = 2'-O-methylcytidine-3'-phosphate
  modified_base 5: mod_base = OTHER; note = 2'-O-methylguanosine-3'-phosphate
  modified_base 6: mod_base = OTHER; note = 2'-O-methyluridine-3'-phosphate
  modified_base 7: mod_base = OTHER; note = 2'-deoxy-2'-fluoroguanosine-3'-phosphate
  modified_base 8: mod_base = OTHER; note = 2'-O-methylguanosine-3'-phosphate
  modified_base 9: mod_base = OTHER; note = 2'-deoxy-2'-fluoroguanosine-3'-phosphate
  modified_base 10: mod_base = OTHER; note = 2'-deoxy-2'-fluorouridine-3'-phosphate
  modified_base 11: mod_base = OTHER; note = 2'-deoxy-2'-fluoroadenosine-3'-phosphate
  modified_base 12: mod_base = OTHER; note = 2'-O-methylguanosine-3'-phosphate
  modified_base 13: mod_base = OTHER; note = 2'-O-methylguanosine-3'-phosphate
  modified_base 14: mod_base = OTHER; note = 2'-O-methylguanosine-3'-phosphate
  modified_base 15: mod_base = OTHER; note = 2'-O-methyladenosine-3'-phosphate
  modified_base 16: mod_base = OTHER; note = 2'-O-methyluridine-3'-phosphate
  modified_base 17: mod_base = OTHER; note = 2'-O-methyluridine-3'-phosphate
  modified_base 18: mod_base = OTHER; note = 2'-O-methyluridine-3'-phosphate
  modified_base 19: mod_base = OTHER; note = 2'-O-methyladenosine-3'-phosphate
  modified_base 20: mod_base = OTHER; note = 2'-O-methylguanosine-3'-phosphate
  modified_base 21: mod_base = OTHER; note = 2'-O-methyladenosine
gaacgtgggtagggatttaga

SEQ ID NO: 4229 - RNA, 21 nt, synthetic construct
  source 1..21: mol_type = other RNA
  modified_base 1: mod_base = OTHER; note = 2'-O-methyladenosine-3'-phosphate
  modified_base 2: mod_base = OTHER; note = 2'-O-methylcytidine-3'-phosphate
  modified_base 3: mod_base = OTHER; note = 2'-O-methylguanosine-3'-phosphate
  modified_base 4: mod_base = OTHER; note = 2'-O-methyluridine-3'-phosphate
  modified_base 5: mod_base = OTHER; note = 2'-O-methylguanosine-3'-phosphate
  modified_base 6: mod_base = OTHER; note = 2'-O-methylguanosine-3'-phosphate
  modified_base 7: mod_base = OTHER; note = 2'-deoxy-2'-fluoroguanosine-3'-phosphate
  modified_base 8: mod_base = OTHER; note = 2'-O-methyluridine-3'-phosphate
  modified_base 9: mod_base = OTHER; note = 2'-deoxy-2'-fluoroadenosine-3'-phosphate
  modified_base 10: mod_base = OTHER; note = 2'-deoxy-2'-fluoroguanosine-3'-phosphate
  modified_base 11: mod_base = OTHER; note = 2'-deoxy-2'-fluoroguanosine-3'-phosphate
  modified_base 12: mod_base = OTHER; note = 2'-O-methylguanosine-3'-phosphate
  modified_base 13: mod_base = OTHER; note = 2'-O-methyladenosine-3'-phosphate
  modified_base 14: mod_base = OTHER; note = 2'-O-methyluridine-3'-phosphate
  modified_base 15: mod_base = OTHER; note = 2'-O-methyluridine-3'-phosphate
  modified_base 16: mod_base = OTHER; note = 2'-O-methyluridine-3'-phosphate
  modified_base 17: mod_base = OTHER; note = 2'-O-methyladenosine-3'-phosphate
  modified_base 18: mod_base = OTHER; note = 2'-O-methylguanosine-3'-phosphate
  modified_base 19: mod_base = OTHER; note = 2'-O-methylcytidine-3'-phosphate
  modified_base 20: mod_base = OTHER; note = 2'-O-methyladenosine-3'-phosphate
  modified_base 21: mod_base = OTHER; note = 2'-O-methyladenosine
acgtgggtagggatttagcaa

SEQ ID NO: 4230 - RNA, 21 nt, synthetic construct
  source 1..21: mol_type = other RNA
  modified_base 1: mod_base = OTHER; note = 2'-O-methyluridine-3'-phosphate
  modified_base 2: mod_base = OTHER; note = 2'-O-methylguanosine-3'-phosphate
  modified_base 3: mod_base = OTHER; note = 2'-O-methylguanosine-3'-phosphate
  modified_base 4: mod_base = OTHER; note = 2'-O-methylguanosine-3'-phosphate
  modified_base 5: mod_base = OTHER; note = 2'-O-methyluridine-3'-phosphate
  modified_base 6: mod_base = OTHER; note = 2'-O-methyladenosine-3'-phosphate
  modified_base 7: mod_base = OTHER; note = 2'-deoxy-2'-fluoroguanosine-3'-phosphate
  modified_base 8: mod_base = OTHER; note = 2'-O-methylguanosine-3'-phosphate
  modified_base 9: mod_base = OTHER; note = 2'-deoxy-2'-fluoroguanosine-3'-phosphate
  modified_base 10: mod_base = OTHER; note = 2'-deoxy-2'-fluoroadenosine-3'-phosphate
  modified_base 11: mod_base = OTHER; note = 2'-deoxy-2'-fluorouridine-3'-phosphate
  modified_base 12: mod_base = OTHER; note = 2'-O-methyluridine-3'-phosphate
  modified_base 13: mod_base = OTHER; note = 2'-O-methyluridine-3'-phosphate
  modified_base 14: mod_base = OTHER; note = 2'-O-methyladenosine-3'-phosphate
  modified_base 15: mod_base = OTHER; note = 2'-O-methylguanosine-3'-phosphate
  modified_base 16: mod_base = OTHER; note = 2'-O-methylcytidine-3'-phosphate
  modified_base 17: mod_base = OTHER; note = 2'-O-methyladenosine-3'-phosphate
  modified_base 18: mod_base = OTHER; note = 2'-O-methyluridine-3'-phosphate
  modified_base 19: mod_base = OTHER; note = 2'-O-methylguanosine-3'-phosphate
  modified_base 20: mod_base = OTHER; note = 2'-O-methylcytidine-3'-phosphate
  modified_base 21: mod_base = OTHER; note = 2'-O-methyladenosine
tgggtagggatttagcatgca

SEQ ID NO: 4231 - RNA, 21 nt, synthetic construct
  source 1..21: mol_type = other RNA
  modified_base 1: mod_base = OTHER; note = 2'-O-methylguanosine-3'-phosphate
  modified_base 2: mod_base = OTHER; note = 2'-O-methylguanosine-3'-phosphate
  modified_base 3: mod_base = OTHER; note = 2'-O-methylguanosine-3'-phosphate
  modified_base 4: mod_base = OTHER; note = 2'-O-methyluridine-3'-phosphate
  modified_base 5: mod_base = OTHER; note = 2'-O-methyladenosine-3'-phosphate
  modified_base 6: mod_base = OTHER; note = 2'-O-methylguanosine-3'-phosphate
  modified_base 7: mod_base = OTHER; note = 2'-deoxy-2'-fluoroguanosine-3'-phosphate
  modified_base 8: mod_base = OTHER; note = 2'-O-methylguanosine-3'-phosphate
  modified_base 9: mod_base = OTHER; note = 2'-deoxy-2'-fluoroadenosine-3'-phosphate
  modified_base 10: mod_base = OTHER; note = 2'-deoxy-2'-fluorouridine-3'-phosphate
  modified_base 11: mod_base = OTHER; note = 2'-deoxy-2'-fluorouridine-3'-phosphate
  modified_base 12: mod_base = OTHER; note = 2'-O-methyluridine-3'-phosphate
  modified_base 13: mod_base = OTHER; note = 2'-O-methyladenosine-3'-phosphate
  modified_base 14: mod_base = OTHER; note = 2'-O-methylguanosine-3'-phosphate
  modified_base 15: mod_base = OTHER; note = 2'-O-methylcytidine-3'-phosphate
  modified_base 16: mod_base = OTHER; note = 2'-O-methyladenosine-3'-phosphate
  modified_base 17: mod_base = OTHER; note = 2'-O-methyluridine-3'-phosphate
  modified_base 18: mod_base = OTHER; note = 2'-O-methylguanosine-3'-phosphate
  modified_base 19: mod_base = OTHER; note = 2'-O-methylcytidine-3'-phosphate
  modified_base 20: mod_base = OTHER; note = 2'-O-methyluridine-3'-phosphate
  modified_base 21: mod_base = OTHER; note = 2'-O-methyladenosine
gggtagggatttagcatgcta

SEQ ID NO: 4232 - RNA, 21 nt, synthetic construct
  source 1..21: mol_type = other RNA
  modified_base 1: mod_base = OTHER; note = 2'-O-methylguanosine-3'-phosphate
  modified_base 2: mod_base = OTHER; note = 2'-O-methylguanosine-3'-phosphate
  modified_base 3: mod_base = OTHER; note = 2'-O-methyluridine-3'-phosphate
  modified_base 4: mod_base = OTHER; note = 2'-O-methyladenosine-3'-phosphate
  modified_base 5: mod_base = OTHER; note = 2'-O-methylguanosine-3'-phosphate
  modified_base 6: mod_base = OTHER; note = 2'-O-methylguanosine-3'-phosphate
  modified_base 7: mod_base = OTHER; note = 2'-deoxy-2'-fluoroguanosine-3'-phosphate
  modified_base 8: mod_base = OTHER; note = 2'-O-methyladenosine-3'-phosphate
  modified_base 9: mod_base = OTHER; note = 2'-deoxy-2'-fluorouridine-3'-phosphate
  modified_base 10: mod_base = OTHER; note = 2'-deoxy-2'-fluorouridine-3'-phosphate
  modified_base 11: mod_base = OTHER; note = 2'-deoxy-2'-fluorouridine-3'-phosphate
  modified_base 12: mod_base = OTHER; note = 2'-O-methyladenosine-3'-phosphate
  modified_base 13: mod_base = OTHER; note = 2'-O-methylguanosine-3'-phosphate
  modified_base 14: mod_base = OTHER; note = 2'-O-methylcytidine-3'-phosphate
  modified_base 15: mod_base = OTHER; note = 2'-O-methyladenosine-3'-phosphate
  modified_base 16: mod_base = OTHER; note = 2'-O-methyluridine-3'-phosphate
  modified_base 17: mod_base = OTHER; note = 2'-O-methylguanosine-3'-phosphate
  modified_base 18: mod_base = OTHER; note = 2'-O-methylcytidine-3'-phosphate
  modified_base 19: mod_base = OTHER; note = 2'-O-methyluridine-3'-phosphate
  modified_base 20: mod_base = OTHER; note = 2'-O-methylguanosine-3'-phosphate
  modified_base 21: mod_base = OTHER; note = 2'-O-methyladenosine
ggtagggatttagcatgctga

SEQ ID NO: 4233 - RNA, 21 nt, synthetic construct
  source 1..21: mol_type = other RNA
  modified_base 1: mod_base = OTHER; note = 2'-O-methylguanosine-3'-phosphate
  modified_base 2: mod_base = OTHER; note = 2'-O-methyluridine-3'-phosphate
  modified_base 3: mod_base = OTHER; note = 2'-O-methyladenosine-3'-phosphate
  modified_base 4: mod_base = OTHER; note = 2'-O-methylguanosine-3'-phosphate
  modified_base 5: mod_base = OTHER; note = 2'-O-methylguanosine-3'-phosphate
  modified_base 6: mod_base = OTHER; note = 2'-O-methylguanosine-3'-phosphate
  modified_base 7: mod_base = OTHER; note = 2'-deoxy-2'-fluoroadenosine-3'-phosphate
  modified_base 8: mod_base = OTHER; note = 2'-O-methyluridine-3'-phosphate
  modified_base 9: mod_base = OTHER; note = 2'-deoxy-2'-fluorouridine-3'-phosphate
  modified_base 10: mod_base = OTHER; note = 2'-deoxy-2'-fluorouridine-3'-phosphate
  modified_base 11: mod_base = OTHER; note = 2'-deoxy-2'-fluoroadenosine-3'-phosphate
  modified_base 12: mod_base = OTHER; note = 2'-O-methylguanosine-3'-phosphate
  modified_base 13: mod_base = OTHER; note = 2'-O-methylcytidine-3'-phosphate
  modified_base 14: mod_base = OTHER; note = 2'-O-methyladenosine-3'-phosphate
  modified_base 15: mod_base = OTHER; note = 2'-O-methyluridine-3'-phosphate
  modified_base 16: mod_base = OTHER; note = 2'-O-methylguanosine-3'-phosphate
  modified_base 17: mod_base = OTHER; note = 2'-O-methylcytidine-3'-phosphate
  modified_base 18: mod_base = OTHER; note = 2'-O-methyluridine-3'-phosphate
  modified_base 19: mod_base = OTHER; note = 2'-O-methylguanosine-3'-phosphate
  modified_base 20: mod_base = OTHER; note = 2'-O-methylguanosine-3'-phosphate
  modified_base 21: mod_base = OTHER; note = 2'-O-methyladenosine
gtagggatttagcatgctgga

SEQ ID NO: 4234 - RNA, 21 nt, synthetic construct
  source 1..21: mol_type = other RNA
  modified_base 1: mod_base = OTHER; note = 2'-O-methyluridine-3'-phosphate
  modified_base 2: mod_base = OTHER; note = 2'-O-methyladenosine-3'-phosphate
  modified_base 3: mod_base = OTHER; note = 2'-O-methylguanosine-3'-phosphate
  modified_base 4: mod_base = OTHER; note = 2'-O-methylguanosine-3'-phosphate
  modified_base 5: mod_base = OTHER; note = 2'-O-methylguanosine-3'-phosphate
  modified_base 6: mod_base = OTHER; note = 2'-O-methyladenosine-3'-phosphate
  modified_base 7: mod_base = OTHER; note = 2'-deoxy-2'-fluorouridine-3'-phosphate
  modified_base 8: mod_base = OTHER; note = 2'-O-methyluridine-3'-phosphate
  modified_base 9: mod_base = OTHER; note = 2'-deoxy-2'-fluorouridine-3'-phosphate
  modified_base 10: mod_base = OTHER; note = 2'-deoxy-2'-fluoroadenosine-3'-phosphate
  modified_base 11: mod_base = OTHER; note = 2'-deoxy-2'-fluoroguanosine-3'-phosphate
  modified_base 12: mod_base = OTHER; note = 2'-O-methylcytidine-3'-phosphate
  modified_base 13: mod_base = OTHER; note = 2'-O-methyladenosine-3'-phosphate
  modified_base 14: mod_base = OTHER; note = 2'-O-methyluridine-3'-phosphate
  modified_base 15: mod_base = OTHER; note = 2'-O-methylguanosine-3'-phosphate
  modified_base 16: mod_base = OTHER; note = 2'-O-methylcytidine-3'-phosphate
  modified_base 17: mod_base = OTHER; note = 2'-O-methyluridine-3'-phosphate
  modified_base 18: mod_base = OTHER; note = 2'-O-methylguanosine-3'-phosphate
  modified_base 19: mod_base = OTHER; note = 2'-O-methylguanosine-3'-phosphate
  modified_base 20: mod_base = OTHER; note = 2'-O-methyladenosine-3'-phosphate
  modified_base 21: mod_base = OTHER; note = 2'-O-methyladenosine
tagggatttagcatgctggaa

SEQ ID NO: 4235 - RNA, 21 nt, synthetic construct
  source 1..21: mol_type = other RNA
  modified_base 1: mod_base = OTHER; note = 2'-O-methyluridine-3'-phosphate
  modified_base 2: mod_base = OTHER; note = 2'-O-methyluridine-3'-phosphate
  modified_base 3: mod_base = OTHER; note = 2'-O-methyluridine-3'-phosphate
  modified_base 4: mod_base = OTHER; note = 2'-O-methyladenosine-3'-phosphate
  modified_base 5: mod_base = OTHER; note = 2'-O-methylguanosine-3'-phosphate
  modified_base 6: mod_base = OTHER; note = 2'-O-methylcytidine-3'-phosphate
  modified_base 7: mod_base = OTHER; note = 2'-deoxy-2'-fluoroadenosine-3'-phosphate
  modified_base 8: mod_base = OTHER; note = 2'-O-methyluridine-3'-phosphate
  modified_base 9: mod_base = OTHER; note = 2'-deoxy-2'-fluoroguanosine-3'-phosphate
  modified_base 10: mod_base = OTHER; note = 2'-deoxy-2'-fluorocytidine-3'-phosphate
  modified_base 11: mod_base = OTHER; note = 2'-deoxy-2'-fluorouridine-3'-phosphate
  modified_base 12: mod_base = OTHER; note = 2'-O-methylguanosine-3'-phosphate
  modified_base 13: mod_base = OTHER; note = 2'-O-methylguanosine-3'-phosphate
  modified_base 14: mod_base = OTHER; note = 2'-O-methyladenosine-3'-phosphate
  modified_base 15: mod_base = OTHER; note = 2'-O-methyladenosine-3'-phosphate
  modified_base 16: mod_base = OTHER; note = 2'-O-methyladenosine-3'-phosphate
  modified_base 17: mod_base = OTHER; note = 2'-O-methyluridine-3'-phosphate
  modified_base 18: mod_base = OTHER; note = 2'-O-methyladenosine-3'-phosphate
  modified_base 19: mod_base = OTHER; note = 2'-O-methyladenosine-3'-phosphate
  modified_base 20: mod_base = OTHER; note = 2'-O-methylcytidine-3'-phosphate
  modified_base 21: mod_base = OTHER; note = 2'-O-methyladenosine
tttagcatgctggaaataaca

SEQ ID NO: 4236 - RNA, 21 nt, synthetic construct
  source 1..21: mol_type = other RNA
  modified_base 1: mod_base = OTHER; note = 2'-O-methyluridine-3'-phosphate
  modified_base 2: mod_base = OTHER; note = 2'-O-methyluridine-3'-phosphate
  modified_base 3: mod_base = OTHER; note = 2'-O-methyladenosine-3'-phosphate
  modified_base 4: mod_base = OTHER; note = 2'-O-methylguanosine-3'-phosphate
  modified_base 5: mod_base = OTHER; note = 2'-O-methylcytidine-3'-phosphate
  modified_base 6: mod_base = OTHER; note = 2'-O-methyladenosine-3'-phosphate
  modified_base 7: mod_base = OTHER; note = 2'-deoxy-2'-fluorouridine-3'-phosphate
  modified_base 8: mod_base = OTHER; note = 2'-O-methylguanosine-3'-phosphate
  modified_base 9: mod_base = OTHER; note = 2'-deoxy-2'-fluorocytidine-3'-phosphate
  modified_base 10: mod_base = OTHER; note = 2'-deoxy-2'-fluorouridine-3'-phosphate
  modified_base 11: mod_base = OTHER; note = 2'-deoxy-2'-fluoroguanosine-3'-phosphate
  modified_base 12: mod_base = OTHER; note = 2'-O-methylguanosine-3'-phosphate
  modified_base 13: mod_base = OTHER; note = 2'-O-methyladenosine-3'-phosphate
  modified_base 14: mod_base = OTHER; note = 2'-O-methyladenosine-3'-phosphate
  modified_base 15: mod_base = OTHER; note = 2'-O-methyladenosine-3'-phosphate
  modified_base 16: mod_base = OTHER; note = 2'-O-methyluridine-3'-phosphate
  modified_base 17: mod_base = OTHER; note = 2'-O-methyladenosine-3'-phosphate
  modified_base 18: mod_base = OTHER; note = 2'-O-methyladenosine-3'-phosphate
  modified_base 19: mod_base = OTHER; note = 2'-O-methylcytidine-3'-phosphate
  modified_base 20: mod_base = OTHER; note = 2'-O-methyluridine-3'-phosphate
  modified_base 21: mod_base = OTHER; note = 2'-O-methyladenosine
ttagcatgctggaaataacta

SEQ ID NO: 4237 - RNA, 21 nt, synthetic construct
  source 1..21: mol_type = other RNA
  modified_base 1: mod_base = OTHER; note = 2'-O-methyluridine-3'-phosphate
  modified_base 2: mod_base = OTHER; note = 2'-O-methyladenosine-3'-phosphate
  modified_base 3: mod_base = OTHER; note = 2'-O-methylguanosine-3'-phosphate
  modified_base 4: mod_base = OTHER; note = 2'-O-methylcytidine-3'-phosphate
  modified_base 5: mod_base = OTHER; note = 2'-O-methyladenosine-3'-phosphate
  modified_base 6: mod_base = OTHER; note = 2'-O-methyluridine-3'-phosphate
  modified_base 7: mod_base = OTHER; note = 2'-deoxy-2'-fluoroguanosine-3'-phosphate
  modified_base 8: mod_base = OTHER; note = 2'-O-methylcytidine-3'-phosphate
  modified_base 9: mod_base = OTHER; note = 2'-deoxy-2'-fluorouridine-3'-phosphate
  modified_base 10: mod_base = OTHER; note = 2'-deoxy-2'-fluoroguanosine-3'-phosphate
  modified_base 11: mod_base = OTHER; note = 2'-deoxy-2'-fluoroguanosine-3'-phosphate
  modified_base 12: mod_base = OTHER; note = 2'-O-methyladenosine-3'-phosphate
  modified_base 13: mod_base = OTHER; note = 2'-O-methyladenosine-3'-phosphate
  modified_base 14: mod_base = OTHER; note = 2'-O-methyladenosine-3'-phosphate
  modified_base 15: mod_base = OTHER; note = 2'-O-methyluridine-3'-phosphate
  modified_base 16: mod_base = OTHER; note = 2'-O-methyladenosine-3'-phosphate
  modified_base 17: mod_base = OTHER; note = 2'-O-methyladenosine-3'-phosphate
  modified_base 18: mod_base = OTHER; note = 2'-O-methylcytidine-3'-phosphate
  modified_base 19: mod_base = OTHER; note = 2'-O-methyluridine-3'-phosphate
  modified_base 20: mod_base = OTHER; note = 2'-O-methylguanosine-3'-phosphate
  modified_base 21: mod_base = OTHER; note = 2'-O-methyladenosine
tagcatgctggaaataactga

SEQ ID NO: 4238 - RNA, 21 nt, synthetic construct
  source 1..21: mol_type = other RNA
  modified_base 1: mod_base = OTHER; note = 2'-O-methyladenosine-3'-phosphate
  modified_base 2: mod_base = OTHER; note = 2'-O-methylguanosine-3'-phosphate
  modified_base 3: mod_base = OTHER; note = 2'-O-methylcytidine-3'-phosphate
  modified_base 4: mod_base = OTHER; note = 2'-O-methyladenosine-3'-phosphate
  modified_base 5: mod_base = OTHER; note = 2'-O-methyluridine-3'-phosphate
  modified_base 6: mod_base = OTHER; note = 2'-O-methylguanosine-3'-phosphate
  modified_base 7: mod_base = OTHER; note = 2'-deoxy-2'-fluorocytidine-3'-phosphate
  modified_base 8: mod_base = OTHER; note = 2'-O-methyluridine-3'-phosphate
  modified_base 9: mod_base = OTHER; note = 2'-deoxy-2'-fluoroguanosine-3'-phosphate
  modified_base 10: mod_base = OTHER; note = 2'-deoxy-2'-fluoroguanosine-3'-phosphate
  modified_base 11: mod_base = OTHER; note = 2'-deoxy-2'-fluoroadenosine-3'-phosphate
  modified_base 12: mod_base = OTHER; note = 2'-O-methyladenosine-3'-phosphate
  modified_base 13: mod_base = OTHER; note = 2'-O-methyladenosine-3'-phosphate
  modified_base 14: mod_base = OTHER; note = 2'-O-methyluridine-3'-phosphate
  modified_base 15: mod_base = OTHER; note = 2'-O-methyladenosine-3'-phosphate
  modified_base 16: mod_base = OTHER; note = 2'-O-methyladenosine-3'-phosphate
  modified_base 17: mod_base = OTHER; note = 2'-O-methylcytidine-3'-phosphate
  modified_base 18: mod_base = OTHER; note = 2'-O-methyluridine-3'-phosphate
  modified_base 19: mod_base = OTHER; note = 2'-O-methylguanosine-3'-phosphate
  modified_base 20: mod_base = OTHER; note = 2'-O-methylguanosine-3'-phosphate
  modified_base 21: mod_base = OTHER; note = 2'-O-methyladenosine
agcatgctggaaataactgga

SEQ ID NO: 4239 - RNA, 21 nt, synthetic construct
  source 1..21: mol_type = other RNA
  modified_base 1: mod_base = OTHER; note = 2'-O-methylguanosine-3'-phosphate
  modified_base 2: mod_base = OTHER; note = 2'-O-methylcytidine-3'-phosphate
  modified_base 3: mod_base = OTHER; note = 2'-O-methyladenosine-3'-phosphate
  modified_base 4: mod_base = OTHER; note = 2'-O-methyluridine-3'-phosphate
  modified_base 5: mod_base = OTHER; note = 2'-O-methylguanosine-3'-phosphate
  modified_base 6: mod_base = OTHER; note = 2'-O-methylcytidine-3'-phosphate
  modified_base 7: mod_base = OTHER; note = 2'-deoxy-2'-fluorouridine-3'-phosphate
  modified_base 8: mod_base = OTHER; note = 2'-O-methylguanosine-3'-phosphate
  modified_base 9: mod_base = OTHER; note = 2'-deoxy-2'-fluoroguanosine-3'-phosphate
  modified_base 10: mod_base = OTHER; note = 2'-deoxy-2'-fluoroadenosine-3'-phosphate
  modified_base 11: mod_base = OTHER; note = 2'-deoxy-2'-fluoroadenosine-3'-phosphate
  modified_base 12: mod_base = OTHER; note = 2'-O-methyladenosine-3'-phosphate
  modified_base 13: mod_base = OTHER; note = 2'-O-methyluridine-3'-phosphate
  modified_base 14: mod_base = OTHER; note = 2'-O-methyladenosine-3'-phosphate
  modified_base 15: mod_base = OTHER; note = 2'-O-methyladenosine-3'-phosphate
  modified_base 16: mod_base = OTHER; note = 2'-O-methylcytidine-3'-phosphate
  modified_base 17: mod_base = OTHER; note = 2'-O-methyluridine-3'-phosphate
  modified_base 18: mod_base = OTHER; note = 2'-O-methylguanosine-3'-phosphate
  modified_base 19: mod_base = OTHER; note = 2'-O-methylguanosine-3'-phosphate
  modified_base 20: mod_base = OTHER; note = 2'-O-methylcytidine-3'-phosphate
  modified_base 21: mod_base = OTHER; note = 2'-O-methyladenosine
gcatgctggaaataactggca

SEQ ID NO: 4240 - RNA, 21 nt, synthetic construct
  source 1..21: mol_type = other RNA
  modified_base 1: mod_base = OTHER; note = 2'-O-methylcytidine-3'-phosphate
  modified_base 2: mod_base = OTHER; note = 2'-O-methyladenosine-3'-phosphate
  modified_base 3: mod_base = OTHER; note = 2'-O-methyluridine-3'-phosphate
  modified_base 4: mod_base = OTHER; note = 2'-O-methylguanosine-3'-phosphate
  modified_base 5: mod_base = OTHER; note = 2'-O-methylcytidine-3'-phosphate
  modified_base 6: mod_base = OTHER; note = 2'-O-methyluridine-3'-phosphate
  modified_base 7: mod_base = OTHER; note = 2'-deoxy-2'-fluoroguanosine-3'-phosphate
  modified_base 8: mod_base = OTHER; note = 2'-O-methylguanosine-3'-phosphate
  modified_base 9: mod_base = OTHER; note = 2'-deoxy-2'-fluoroadenosine-3'-phosphate
  modified_base 10: mod_base = OTHER; note = 2'-deoxy-2'-fluoroadenosine-3'-phosphate
  modified_base 11: mod_base = OTHER; note = 2'-deoxy-2'-fluoroadenosine-3'-phosphate
  modified_base 12: mod_base = OTHER; note = 2'-O-methyluridine-3'-phosphate
  modified_base 13: mod_base = OTHER; note = 2'-O-methyladenosine-3'-phosphate
  modified_base 14: mod_base = OTHER; note = 2'-O-methyladenosine-3'-phosphate
  modified_base 15: mod_base = OTHER; note = 2'-O-methylcytidine-3'-phosphate
  modified_base 16: mod_base = OTHER; note = 2'-O-methyluridine-3'-phosphate
  modified_base 17: mod_base = OTHER; note = 2'-O-methylguanosine-3'-phosphate
  modified_base 18: mod_base = OTHER; note = 2'-O-methylguanosine-3'-phosphate
  modified_base 19: mod_base = OTHER; note = 2'-O-methylcytidine-3'-phosphate
  modified_base 20: mod_base = OTHER; note = 2'-O-methyladenosine-3'-phosphate
  modified_base 21: mod_base = OTHER; note = 2'-O-methyladenosine
catgctggaaataactggcaa

SEQ ID NO: 4241 - RNA, 21 nt, synthetic construct
  source 1..21: mol_type = other RNA
  modified_base 1: mod_base = OTHER; note = 2'-O-methyladenosine-3'-phosphate
  modified_base 2: mod_base = OTHER; note = 2'-O-methyluridine-3'-phosphate
  modified_base 3: mod_base = OTHER; note = 2'-O-methylguanosine-3'-phosphate
  modified_base 4: mod_base = OTHER; note = 2'-O-methylcytidine-3'-phosphate
  modified_base 5: mod_base = OTHER; note = 2'-O-methyluridine-3'-phosphate
  modified_base 6: mod_base = OTHER; note = 2'-O-methylguanosine-3'-phosphate
  modified_base 7: mod_base = OTHER; note = 2'-deoxy-2'-fluoroguanosine-3'-phosphate
  modified_base 8: mod_base = OTHER; note = 2'-O-methyladenosine-3'-phosphate
  modified_base 9: mod_base = OTHER; note = 2'-deoxy-2'-fluoroadenosine-3'-phosphate
  modified_base 10: mod_base = OTHER; note = 2'-deoxy-2'-fluoroadenosine-3'-phosphate
  modified_base 11: mod_base = OTHER; note = 2'-deoxy-2'-fluorouridine-3'-phosphate
  modified_base 12: mod_base = OTHER; note = 2'-O-methyladenosine-3'-phosphate
  modified_base 13: mod_base = OTHER; note = 2'-O-methyladenosine-3'-phosphate
  modified_base 14: mod_base = OTHER; note = 2'-O-methylcytidine-3'-phosphate
  modified_base 15: mod_base = OTHER; note = 2'-O-methyluridine-3'-phosphate
  modified_base 16: mod_base = OTHER; note = 2'-O-methylguanosine-3'-phosphate
  modified_base 17: mod_base = OTHER; note = 2'-O-methylguanosine-3'-phosphate
  modified_base 18: mod_base = OTHER; note = 2'-O-methylcytidine-3'-phosphate
  modified_base 19: mod_base = OTHER; note = 2'-O-methyladenosine-3'-phosphate
  modified_base 20: mod_base = OTHER; note = 2'-O-methylguanosine-3'-phosphate
  modified_base 21: mod_base = OTHER; note = 2'-O-methyladenosine
atgctggaaataactggcaga

SEQ ID NO: 4242 - RNA, 21 nt, synthetic construct
  source 1..21: mol_type = other RNA
  modified_base 1: mod_base = OTHER; note = 2'-O-methyluridine-3'-phosphate
  modified_base 2: mod_base = OTHER; note = 2'-O-methylguanosine-3'-phosphate
  modified_base 3: mod_base = OTHER; note = 2'-O-methylcytidine-3'-phosphate
  modified_base 4: mod_base = OTHER; note = 2'-O-methyluridine-3'-phosphate
  modified_base 5: mod_base = OTHER; note = 2'-O-methylguanosine-3'-phosphate
  modified_base 6: mod_base = OTHER; note = 2'-O-methylguanosine-3'-phosphate
  modified_base 7: mod_base = OTHER; note = 2'-deoxy-2'-fluoroadenosine-3'-phosphate
  modified_base 8: mod_base = OTHER; note = 2'-O-methyladenosine-3'-phosphate
  modified_base 9: mod_base = OTHER; note = 2'-deoxy-2'-fluoroadenosine-3'-phosphate
  modified_base 10: mod_base = OTHER; note = 2'-deoxy-2'-fluorouridine-3'-phosphate
  modified_base 11: mod_base = OTHER; note = 2'-deoxy-2'-fluoroadenosine-3'-phosphate
  modified_base 12: mod_base = OTHER; note = 2'-O-methyladenosine-3'-phosphate
  modified_base 13: mod_base = OTHER; note = 2'-O-methylcytidine-3'-phosphate
  modified_base 14: mod_base = OTHER; note = 2'-O-methyluridine-3'-phosphate
  modified_base 15: mod_base = OTHER; note = 2'-O-methylguanosine-3'-phosphate
  modified_base 16: mod_base = OTHER; note = 2'-O-methylguanosine-3'-phosphate
  modified_base 17: mod_base = OTHER; note = 2'-O-methylcytidine-3'-phosphate
  modified_base 18: mod_base = OTHER; note = 2'-O-methyladenosine-3'-phosphate
  modified_base 19: mod_base = OTHER; note = 2'-O-methylguanosine-3'-phosphate
  modified_base 20: mod_base = OTHER; note = 2'-O-methyluridine-3'-phosphate
  modified_base 21: mod_base = OTHER; note = 2'-O-methyladenosine
tgctggaaataactggcagta

SEQ ID NO: 4243 - RNA, 21 nt, synthetic construct
  source 1..21: mol_type = other RNA
  modified_base 1: mod_base = OTHER; note = 2'-O-methylguanosine-3'-phosphate
  modified_base 2: mod_base = OTHER; note = 2'-O-methylcytidine-3'-phosphate
  modified_base 3: mod_base = OTHER; note = 2'-O-methyluridine-3'-phosphate
  modified_base 4: mod_base = OTHER; note = 2'-O-methylguanosine-3'-phosphate
  modified_base 5: mod_base = OTHER; note = 2'-O-methylguanosine-3'-phosphate
  modified_base 6: mod_base = OTHER; note = 2'-O-methyladenosine-3'-phosphate
  modified_base 7: mod_base = OTHER; note = 2'-deoxy-2'-fluoroadenosine-3'-phosphate
  modified_base 8: mod_base = OTHER; note = 2'-O-methyladenosine-3'-phosphate
  modified_base 9: mod_base = OTHER; note = 2'-deoxy-2'-fluorouridine-3'-phosphate
  modified_base 10: mod_base = OTHER; note = 2'-deoxy-2'-fluoroadenosine-3'-phosphate
  modified_base 11: mod_base = OTHER; note = 2'-deoxy-2'-fluoroadenosine-3'-phosphate
  modified_base 12: mod_base = OTHER; note = 2'-O-methylcytidine-3'-phosphate
  modified_base 13: mod_base = OTHER; note = 2'-O-methyluridine-3'-phosphate
  modified_base 14: mod_base = OTHER; note = 2'-O-methylguanosine-3'-phosphate
  modified_base 15: mod_base = OTHER; note = 2'-O-methylguanosine-3'-phosphate
  modified_base 16: mod_base = OTHER; note = 2'-O-methylcytidine-3'-phosphate
  modified_base 17: mod_base = OTHER; note = 2'-O-methyladenosine-3'-phosphate
  modified_base 18: mod_base = OTHER; note = 2'-O-methylguanosine-3'-phosphate
  modified_base 19: mod_base = OTHER; note = 2'-O-methyluridine-3'-phosphate
  modified_base 20: mod_base = OTHER; note = 2'-O-methyladenosine-3'-phosphate
  modified_base 21: mod_base = OTHER; note = 2'-O-methyladenosine
gctggaaataactggcagtaa

SEQ ID NO: 4244 - RNA, 21 nt, synthetic construct
  source 1..21: mol_type = other RNA
  modified_base 1: mod_base = OTHER; note = 2'-O-methylcytidine-3'-phosphate
  modified_base 2: mod_base = OTHER; note = 2'-O-methyluridine-3'-phosphate
  modified_base 3: mod_base = OTHER; note = 2'-O-methylguanosine-3'-phosphate
  modified_base 4: mod_base = OTHER; note = 2'-O-methylguanosine-3'-phosphate
  modified_base 5: mod_base = OTHER; note = 2'-O-methyladenosine-3'-phosphate
  modified_base 6: mod_base = OTHER; note = 2'-O-methyladenosine-3'-phosphate
  modified_base 7: mod_base = OTHER; note = 2'-deoxy-2'-fluoroadenosine-3'-phosphate
  modified_base 8: mod_base = OTHER; note = 2'-O-methyluridine-3'-phosphate
  modified_base 9: mod_base = OTHER; note = 2'-deoxy-2'-fluoroadenosine-3'-phosphate
  modified_base 10: mod_base = OTHER; note = 2'-deoxy-2'-fluoroadenosine-3'-phosphate
  modified_base 11: mod_base = OTHER; note = 2'-deoxy-2'-fluorocytidine-3'-phosphate
  modified_base 12: mod_base = OTHER; note = 2'-O-methyluridine-3'-phosphate
  modified_base 13: mod_base = OTHER; note = 2'-O-methylguanosine-3'-phosphate
  modified_base 14: mod_base = OTHER; note = 2'-O-methylguanosine-3'-phosphate
  modified_base 15: mod_base = OTHER; note = 2'-O-methylcytidine-3'-phosphate
  modified_base 16: mod_base = OTHER; note = 2'-O-methyladenosine-3'-phosphate
  modified_base 17: mod_base = OTHER; note = 2'-O-methylguanosine-3'-phosphate
  modified_base 18: mod_base = OTHER; note = 2'-O-methyluridine-3'-phosphate
  modified_base 19: mod_base = OTHER; note = 2'-O-methyladenosine-3'-phosphate
  modified_base 20: mod_base = OTHER; note = 2'-O-methyladenosine-3'-phosphate
  modified_base 21: mod_base = OTHER; note = 2'-O-methyladenosine
ctggaaataactggcagtaaa

SEQ ID NO: 4245 - RNA, 21 nt, synthetic construct
  source 1..21: mol_type = other RNA
  modified_base 1: mod_base = OTHER; note = 2'-O-methyluridine-3'-phosphate
  modified_base 2: mod_base = OTHER; note = 2'-O-methylguanosine-3'-phosphate
  modified_base 3: mod_base = OTHER; note = 2'-O-methylguanosine-3'-phosphate
  modified_base 4: mod_base = OTHER; note = 2'-O-methyladenosine-3'-phosphate
  modified_base 5: mod_base = OTHER; note = 2'-O-methyladenosine-3'-phosphate
  modified_base 6: mod_base = OTHER; note = 2'-O-methyladenosine-3'-phosphate
  modified_base 7: mod_base = OTHER; note = 2'-deoxy-2'-fluorouridine-3'-phosphate
  modified_base 8: mod_base = OTHER; note = 2'-O-methyladenosine-3'-phosphate
  modified_base 9: mod_base = OTHER; note = 2'-deoxy-2'-fluoroadenosine-3'-phosphate
  modified_base 10: mod_base = OTHER; note = 2'-deoxy-2'-fluorocytidine-3'-phosphate
  modified_base 11: mod_base = OTHER; note = 2'-deoxy-2'-fluorouridine-3'-phosphate
  modified_base 12: mod_base = OTHER; note = 2'-O-methylguanosine-3'-phosphate
  modified_base 13: mod_base = OTHER; note = 2'-O-methylguanosine-3'-phosphate
  modified_base 14: mod_base = OTHER; note = 2'-O-methylcytidine-3'-phosphate
  modified_base 15: mod_base = OTHER; note = 2'-O-methyladenosine-3'-phosphate
  modified_base 16: mod_base = OTHER; note = 2'-O-methylguanosine-3'-phosphate
  modified_base 17: mod_base = OTHER; note = 2'-O-methyluridine-3'-phosphate
  modified_base 18: mod_base = OTHER; note = 2'-O-methyladenosine-3'-phosphate
  modified_base 19: mod_base = OTHER; note = 2'-O-methyladenosine-3'-phosphate
  modified_base 20: mod_base = OTHER; note = 2'-O-methyluridine-3'-phosphate
  modified_base 21: mod_base = OTHER; note = 2'-O-methyladenosine
tggaaataactggcagtaata

SEQ ID NO: 4246 - RNA, 21 nt, synthetic construct
  source 1..21: mol_type = other RNA
  modified_base 1: mod_base = OTHER; note = 2'-O-methylguanosine-3'-phosphate
  modified_base 2: mod_base = OTHER; note = 2'-O-methylguanosine-3'-phosphate
  modified_base 3: mod_base = OTHER; note = 2'-O-methyladenosine-3'-phosphate
  modified_base 4: mod_base = OTHER; note = 2'-O-methyladenosine-3'-phosphate
  modified_base 5: mod_base = OTHER; note = 2'-O-methyladenosine-3'-phosphate
  modified_base 6: mod_base = OTHER; note = 2'-O-methyluridine-3'-phosphate
  modified_base 7: mod_base = OTHER; note = 2'-deoxy-2'-fluoroadenosine-3'-phosphate
  modified_base 8: mod_base = OTHER; note = 2'-O-methyladenosine-3'-phosphate
  modified_base 9: mod_base = OTHER; note = 2'-deoxy-2'-fluorocytidine-3'-phosphate
  modified_base 10: mod_base = OTHER; note = 2'-deoxy-2'-fluorouridine-3'-phosphate
  modified_base 11: mod_base = OTHER; note = 2'-deoxy-2'-fluoroguanosine-3'-phosphate
  modified_base 12: mod_base = OTHER; note = 2'-O-methylguanosine-3'-phosphate
  modified_base 13: mod_base = OTHER; note = 2'-O-methylcytidine-3'-phosphate
  modified_base 14: mod_base = OTHER; note = 2'-O-methyladenosine-3'-phosphate
  modified_base 15: mod_base = OTHER; note = 2'-O-methylguanosine-3'-phosphate
  modified_base 16: mod_base = OTHER; note = 2'-O-methyluridine-3'-phosphate
  modified_base 17: mod_base = OTHER; note = 2'-O-methyladenosine-3'-phosphate
  modified_base 18: mod_base = OTHER; note = 2'-O-methyladenosine-3'-phosphate
  modified_base 19: mod_base = OTHER; note = 2'-O-methyluridine-3'-phosphate
  modified_base 20: mod_base = OTHER; note = 2'-O-methylcytidine-3'-phosphate
  modified_base 21: mod_base = OTHER; note = 2'-O-methyladenosine
ggaaataactggcagtaatca

SEQ ID NO: 4247 - RNA, 21 nt, synthetic construct
  source 1..21: mol_type = other RNA
  modified_base 1: mod_base = OTHER; note = 2'-O-methylguanosine-3'-phosphate
  modified_base 2: mod_base = OTHER; note = 2'-O-methyladenosine-3'-phosphate
  modified_base 3: mod_base = OTHER; note = 2'-O-methyladenosine-3'-phosphate
  modified_base 4: mod_base = OTHER; note = 2'-O-methyladenosine-3'-phosphate
  modified_base 5: mod_base = OTHER; note = 2'-O-methyluridine-3'-phosphate
  modified_base 6: mod_base = OTHER; note = 2'-O-methyladenosine-3'-phosphate
  modified_base 7: mod_base = OTHER; note = 2'-deoxy-2'-fluoroadenosine-3'-phosphate
  modified_base 8: mod_base = OTHER; note = 2'-O-methylcytidine-3'-phosphate
  modified_base 9: mod_base = OTHER; note = 2'-deoxy-2'-fluorouridine-3'-phosphate
  modified_base 10: mod_base = OTHER; note = 2'-deoxy-2'-fluoroguanosine-3'-phosphate
  modified_base 11: mod_base = OTHER; note = 2'-deoxy-2'-fluoroguanosine-3'-phosphate
  modified_base 12: mod_base = OTHER; note = 2'-O-methylcytidine-3'-phosphate
  modified_base 13: mod_base = OTHER; note = 2'-O-methyladenosine-3'-phosphate
  modified_base 14: mod_base = OTHER; note = 2'-O-methylguanosine-3'-phosphate
  modified_base 15: mod_base = OTHER; note = 2'-O-methyluridine-3'-phosphate
  modified_base 16: mod_base = OTHER; note = 2'-O-methyladenosine-3'-phosphate
  modified_base 17: mod_base = OTHER; note = 2'-O-methyladenosine-3'-phosphate
  modified_base 18: mod_base = OTHER; note = 2'-O-methyluridine-3'-phosphate
  modified_base 19: mod_base = OTHER; note = 2'-O-methylcytidine-3'-phosphate
  modified_base 20: mod_base = OTHER; note = 2'-O-methyladenosine-3'-phosphate
  modified_base 21: mod_base = OTHER; note = 2'-O-methyladenosine
gaaataactggcagtaatcaa

SEQ ID NO: 4248 - RNA, 21 nt, synthetic construct
  source 1..21: mol_type = other RNA
  modified_base 1: mod_base = OTHER; note = 2'-O-methyladenosine-3'-phosphate
  modified_base 2: mod_base = OTHER; note = 2'-O-methyladenosine-3'-phosphate
  modified_base 3: mod_base = OTHER; note = 2'-O-methyladenosine-3'-phosphate
  modified_base 4: mod_base = OTHER; note = 2'-O-methyluridine-3'-phosphate
  modified_base 5: mod_base = OTHER; note = 2'-O-methyladenosine-3'-phosphate
  modified_base 6: mod_base = OTHER; note = 2'-O-methyladenosine-3'-phosphate
  modified_base 7: mod_base = OTHER; note = 2'-deoxy-2'-fluorocytidine-3'-phosphate
  modified_base 8: mod_base = OTHER; note = 2'-O-methyluridine-3'-phosphate
  modified_base 9: mod_base = OTHER; note = 2'-deoxy-2'-fluoroguanosine-3'-phosphate
  modified_base 10: mod_base = OTHER; note = 2'-deoxy-2'-fluoroguanosine-3'-phosphate
  modified_base 11: mod_base = OTHER; note = 2'-deoxy-2'-fluorocytidine-3'-phosphate
  modified_base 12: mod_base = OTHER; note = 2'-O-methyladenosine-3'-phosphate
  modified_base 13: mod_base = OTHER; note = 2'-O-methylguanosine-3'-phosphate
  modified_base 14: mod_base = OTHER; note = 2'-O-methyluridine-3'-phosphate
  modified_base 15: mod_base = OTHER; note = 2'-O-methyladenosine-3'-phosphate
  modified_base 16: mod_base = OTHER; note = 2'-O-methyladenosine-3'-phosphate
  modified_base 17: mod_base = OTHER; note = 2'-O-methyluridine-3'-phosphate
  modified_base 18: mod_base = OTHER; note = 2'-O-methylcytidine-3'-phosphate
  modified_base 19: mod_base = OTHER; note = 2'-O-methyladenosine-3'-phosphate
  modified_base 20: mod_base = OTHER; note = 2'-O-methyladenosine-3'-phosphate
  modified_base 21: mod_base = OTHER; note = 2'-O-methyladenosine
aaataactggcagtaatcaaa

SEQ ID NO: 4249 - RNA, 21 nt, synthetic construct
  source 1..21: mol_type = other RNA
  modified_base 1: mod_base = OTHER; note = 2'-O-methyladenosine-3'-phosphate
  modified_base 2: mod_base = OTHER; note = 2'-O-methyladenosine-3'-phosphate
  modified_base 3: mod_base = OTHER; note = 2'-O-methyluridine-3'-phosphate
  modified_base 4: mod_base = OTHER; note = 2'-O-methyladenosine-3'-phosphate
  modified_base 5: mod_base = OTHER; note = 2'-O-methyladenosine-3'-phosphate
  modified_base 6: mod_base = OTHER; note = 2'-O-methylcytidine-3'-phosphate
  modified_base 7: mod_base = OTHER; note = 2'-deoxy-2'-fluorouridine-3'-phosphate
  modified_base 8: mod_base = OTHER; note = 2'-O-methylguanosine-3'-phosphate
  modified_base 9: mod_base = OTHER; note = 2'-deoxy-2'-fluoroguanosine-3'-phosphate
  modified_base 10: mod_base = OTHER; note = 2'-deoxy-2'-fluorocytidine-3'-phosphate
  modified_base 11: mod_base = OTHER; note = 2'-deoxy-2'-fluoroadenosine-3'-phosphate
  modified_base 12: mod_base = OTHER; note = 2'-O-methylguanosine-3'-phosphate
  modified_base 13: mod_base = OTHER; note = 2'-O-methyluridine-3'-phosphate
  modified_base 14: mod_base = OTHER; note = 2'-O-methyladenosine-3'-phosphate
  modified_base 15: mod_base = OTHER; note = 2'-O-methyladenosine-3'-phosphate
  modified_base 16: mod_base = OTHER; note = 2'-O-methyluridine-3'-phosphate
  modified_base 17: mod_base = OTHER; note = 2'-O-methylcytidine-3'-phosphate
  modified_base 18: mod_base = OTHER; note = 2'-O-methyladenosine-3'-phosphate
  modified_base 19: mod_base = OTHER; note = 2'-O-methyladenosine-3'-phosphate
  modified_base 20: mod_base = OTHER; note = 2'-O-methyladenosine-3'-phosphate
  modified_base 21: mod_base = OTHER; note = 2'-O-methyladenosine
aataactggcagtaatcaaaa

SEQ ID NO: 4250 - RNA, 21 nt, synthetic construct
  source 1..21: mol_type = other RNA
  modified_base 1: mod_base = OTHER; note = 2'-O-methyladenosine-3'-phosphate
  modified_base 2: mod_base = OTHER; note = 2'-O-methyluridine-3'-phosphate
  modified_base 3: mod_base = OTHER; note = 2'-O-methyladenosine-3'-phosphate
  modified_base 4: mod_base = OTHER; note = 2'-O-methyladenosine-3'-phosphate
  modified_base 5: mod_base = OTHER; note = 2'-O-methylcytidine-3'-phosphate
  modified_base 6: mod_base = OTHER; note = 2'-O-methyluridine-3'-phosphate
  modified_base 7: mod_base = OTHER; note = 2'-deoxy-2'-fluoroguanosine-3'-phosphate
  modified_base 8: mod_base = OTHER; note = 2'-O-methylguanosine-3'-phosphate
  modified_base 9: mod_base = OTHER; note = 2'-deoxy-2'-fluorocytidine-3'-phosphate
  modified_base 10: mod_base = OTHER; note = 2'-deoxy-2'-fluoroadenosine-3'-phosphate
  modified_base 11: mod_base = OTHER; note = 2'-deoxy-2'-fluoroguanosine-3'-phosphate
  modified_base 12: mod_base = OTHER; note = 2'-O-methyluridine-3'-phosphate
  modified_base 13: mod_base = OTHER; note = 2'-O-methyladenosine-3'-phosphate
  modified_base 14: mod_base = OTHER; note = 2'-O-methyladenosine-3'-phosphate
  modified_base 15: mod_base = OTHER; note = 2'-O-methyluridine-3'-phosphate
  modified_base 16: mod_base = OTHER; note = 2'-O-methylcytidine-3'-phosphate
  modified_base 17: mod_base = OTHER; note = 2'-O-methyladenosine-3'-phosphate
  modified_base 18: mod_base = OTHER; note = 2'-O-methyladenosine-3'-phosphate
  modified_base 19: mod_base = OTHER; note = 2'-O-methyladenosine-3'-phosphate
  modified_base 20: mod_base = OTHER; note = 2'-O-methylcytidine-3'-phosphate
  modified_base 21: mod_base = OTHER; note = 2'-O-methyladenosine
ataactggcagtaatcaaaca

SEQ ID NO: 4251 - RNA, 21 nt, synthetic construct
  source 1..21: mol_type = other RNA
  modified_base 1: mod_base = OTHER; note = 2'-O-methyladenosine-3'-phosphate
  modified_base 2: mod_base = OTHER; note = 2'-O-methyladenosine-3'-phosphate
  modified_base 3: mod_base = OTHER; note = 2'-O-methylcytidine-3'-phosphate
  modified_base 4: mod_base = OTHER; note = 2'-O-methyluridine-3'-phosphate
  modified_base 5: mod_base = OTHER; note = 2'-O-methylguanosine-3'-phosphate
  modified_base 6: mod_base = OTHER; note = 2'-O-methylguanosine-3'-phosphate
  modified_base 7: mod_base = OTHER; note = 2'-deoxy-2'-fluorocytidine-3'-phosphate
  modified_base 8: mod_base = OTHER; note = 2'-O-methyladenosine-3'-phosphate
  modified_base 9: mod_base = OTHER; note = 2'-deoxy-2'-fluoroguanosine-3'-phosphate
  modified_base 10: mod_base = OTHER; note = 2'-deoxy-2'-fluorouridine-3'-phosphate
  modified_base 11: mod_base = OTHER; note = 2'-deoxy-2'-fluoroadenosine-3'-phosphate
  modified_base 12: mod_base = OTHER; note = 2'-O-methyladenosine-3'-phosphate
  modified_base 13: mod_base = OTHER; note = 2'-O-methyluridine-3'-phosphate
  modified_base 14: mod_base = OTHER; note = 2'-O-methylcytidine-3'-phosphate
  modified_base 15: mod_base = OTHER; note = 2'-O-methyladenosine-3'-phosphate
  modified_base 16: mod_base = OTHER; note = 2'-O-methyladenosine-3'-phosphate
  modified_base 17: mod_base = OTHER; note = 2'-O-methyladenosine-3'-phosphate
  modified_base 18: mod_base = OTHER; note = 2'-O-methylcytidine-3'-phosphate
  modified_base 19: mod_base = OTHER; note = 2'-O-methylguanosine-3'-phosphate
  modified_base 20: mod_base = OTHER; note = 2'-O-methyladenosine-3'-phosphate
  modified_base 21: mod_base = OTHER; note = 2'-O-methyladenosine
aactggcagtaatcaaacgaa

SEQ ID NO: 4252 - RNA, 21 nt, synthetic construct
  source 1..21: mol_type = other RNA
  modified_base 1: mod_base = OTHER; note = 2'-O-methyladenosine-3'-phosphate
  modified_base 2: mod_base = OTHER; note = 2'-O-methylcytidine-3'-phosphate
  modified_base 3: mod_base = OTHER; note = 2'-O-methyluridine-3'-phosphate
  modified_base 4: mod_base = OTHER; note = 2'-O-methylguanosine-3'-phosphate
  modified_base 5: mod_base = OTHER; note = 2'-O-methylguanosine-3'-phosphate
  modified_base 6: mod_base = OTHER; note = 2'-O-methylcytidine-3'-phosphate
  modified_base 7: mod_base = OTHER; note = 2'-deoxy-2'-fluoroadenosine-3'-phosphate
  modified_base 8: mod_base = OTHER; note = 2'-O-methylguanosine-3'-phosphate
  modified_base 9: mod_base = OTHER; note = 2'-deoxy-2'-fluorouridine-3'-phosphate
  modified_base 10: mod_base = OTHER; note = 2'-deoxy-2'-fluoroadenosine-3'-phosphate
  modified_base 11: mod_base = OTHER; note = 2'-deoxy-2'-fluoroadenosine-3'-phosphate
  modified_base 12: mod_base = OTHER; note = 2'-O-methyluridine-3'-phosphate
  modified_base 13: mod_base = OTHER; note = 2'-O-methylcytidine-3'-phosphate
  modified_base 14: mod_base = OTHER; note = 2'-O-methyladenosine-3'-phosphate
  modified_base 15: mod_base = OTHER; note = 2'-O-methyladenosine-3'-phosphate
  modified_base 16: mod_base = OTHER; note = 2'-O-methyladenosine-3'-phosphate
  modified_base 17: mod_base = OTHER; note = 2'-O-methylcytidine-3'-phosphate
  modified_base 18: mod_base = OTHER; note = 2'-O-methylguanosine-3'-phosphate
  modified_base 19: mod_base = OTHER; note = 2'-O-methyladenosine-3'-phosphate
  modified_base 20: mod_base = OTHER; note = 2'-O-methyladenosine-3'-phosphate
  modified_base 21: mod_base = OTHER; note = 2'-O-methyladenosine
actggcagtaatcaaacgaaa

SEQ ID NO: 4253 - RNA, 21 nt, synthetic construct
  source 1..21: mol_type = other RNA
  modified_base 1: mod_base = OTHER; note = 2'-O-methylcytidine-3'-phosphate
  modified_base 2: mod_base = OTHER; note = 2'-O-methyluridine-3'-phosphate
  modified_base 3: mod_base = OTHER; note = 2'-O-methylguanosine-3'-phosphate
  modified_base 4: mod_base = OTHER; note = 2'-O-methylguanosine-3'-phosphate
  modified_base 5: mod_base = OTHER; note = 2'-O-methylcytidine-3'-phosphate
  modified_base 6: mod_base = OTHER; note = 2'-O-methyladenosine-3'-phosphate
  modified_base 7: mod_base = OTHER; note = 2'-deoxy-2'-fluoroguanosine-3'-phosphate
  modified_base 8: mod_base = OTHER; note = 2'-O-methyluridine-3'-phosphate
  modified_base 9: mod_base = OTHER; note = 2'-deoxy-2'-fluoroadenosine-3'-phosphate
  modified_base 10: mod_base = OTHER; note = 2'-deoxy-2'-fluoroadenosine-3'-phosphate
  modified_base 11: mod_base = OTHER; note = 2'-deoxy-2'-fluorouridine-3'-phosphate
  modified_base 12: mod_base = OTHER; note = 2'-O-methylcytidine-3'-phosphate
  modified_base 13: mod_base = OTHER; note = 2'-O-methyladenosine-3'-phosphate
  modified_base 14: mod_base = OTHER; note = 2'-O-methyladenosine-3'-phosphate
  modified_base 15: mod_base = OTHER; note = 2'-O-methyladenosine-3'-phosphate
  modified_base 16: mod_base = OTHER; note = 2'-O-methylcytidine-3'-phosphate
  modified_base 17: mod_base = OTHER; note = 2'-O-methylguanosine-3'-phosphate
  modified_base 18: mod_base = OTHER; note = 2'-O-methyladenosine-3'-phosphate
  modified_base 19: mod_base = OTHER; note = 2'-O-methyladenosine-3'-phosphate
  modified_base 20: mod_base = OTHER; note = 2'-O-methylguanosine-3'-phosphate
  modified_base 21: mod_base = OTHER; note = 2'-O-methyladenosine
ctggcagtaatcaaacgaaga

SEQ ID NO: 4254 - RNA, 21 nt, synthetic construct
  source 1..21: mol_type = other RNA
  modified_base 1: mod_base = OTHER; note = 2'-O-methyluridine-3'-phosphate
  modified_base 2: mod_base = OTHER; note = 2'-O-methylguanosine-3'-phosphate
  modified_base 3: mod_base = OTHER; note = 2'-O-methylguanosine-3'-phosphate
  modified_base 4: mod_base = OTHER; note = 2'-O-methylcytidine-3'-phosphate
  modified_base 5: mod_base = OTHER; note = 2'-O-methyladenosine-3'-phosphate
  modified_base 6: mod_base = OTHER; note = 2'-O-methylguanosine-3'-phosphate
  modified_base 7: mod_base = OTHER; note = 2'-deoxy-2'-fluorouridine-3'-phosphate
  modified_base 8: mod_base = OTHER; note = 2'-O-methyladenosine-3'-phosphate
  modified_base 9: mod_base = OTHER; note = 2'-deoxy-2'-fluoroadenosine-3'-phosphate
  modified_base 10: mod_base = OTHER; note = 2'-deoxy-2'-fluorouridine-3'-phosphate
  modified_base 11: mod_base = OTHER; note = 2'-deoxy-2'-fluorocytidine-3'-phosphate
  modified_base 12: mod_base = OTHER; note = 2'-O-methyladenosine-3'-phosphate
  modified_base 13: mod_base = OTHER; note = 2'-O-methyladenosine-3'-phosphate
  modified_base 14: mod_base = OTHER; note = 2'-O-methyladenosine-3'-phosphate
  modified_base 15: mod_base = OTHER; note = 2'-O-methylcytidine-3'-phosphate
  modified_base 16: mod_base = OTHER; note = 2'-O-methylguanosine-3'-phosphate
  modified_base 17: mod_base = OTHER; note = 2'-O-methyladenosine-3'-phosphate
  modified_base 18: mod_base = OTHER; note = 2'-O-methyladenosine-3'-phosphate
  modified_base 19: mod_base = OTHER; note = 2'-O-methylguanosine-3'-phosphate
  modified_base 20: mod_base = OTHER; note = 2'-O-methyladenosine-3'-phosphate
  modified_base 21: mod_base = OTHER; note = 2'-O-methyladenosine
tggcagtaatcaaacgaagaa

SEQ ID NO: 4255 - RNA, 21 nt, synthetic construct
  source 1..21: mol_type = other RNA
  modified_base 1: mod_base = OTHER; note = 2'-O-methylguanosine-3'-phosphate
  modified_base 2: mod_base = OTHER; note = 2'-O-methylguanosine-3'-phosphate
  modified_base 3: mod_base = OTHER; note = 2'-O-methylcytidine-3'-phosphate
  modified_base 4: mod_base = OTHER; note = 2'-O-methyladenosine-3'-phosphate
  modified_base 5: mod_base = OTHER; note = 2'-O-methylguanosine-3'-phosphate
  modified_base 6: mod_base = OTHER; note = 2'-O-methyluridine-3'-phosphate
  modified_base 7: mod_base = OTHER; note = 2'-deoxy-2'-fluoroadenosine-3'-phosphate
  modified_base 8: mod_base = OTHER; note = 2'-O-methyladenosine-3'-phosphate
  modified_base 9: mod_base = OTHER; note = 2'-deoxy-2'-fluorouridine-3'-phosphate
  modified_base 10: mod_base = OTHER; note = 2'-deoxy-2'-fluorocytidine-3'-phosphate
  modified_base 11: mod_base = OTHER; note = 2'-deoxy-2'-fluoroadenosine-3'-phosphate
  modified_base 12: mod_base = OTHER; note = 2'-O-methyladenosine-3'-phosphate
  modified_base 13: mod_base = OTHER; note = 2'-O-methyladenosine-3'-phosphate
  modified_base 14: mod_base = OTHER; note = 2'-O-methylcytidine-3'-phosphate
  modified_base 15: mod_base = OTHER; note = 2'-O-methylguanosine-3'-phosphate
  modified_base 16: mod_base = OTHER; note = 2'-O-methyladenosine-3'-phosphate
  modified_base 17: mod_base = OTHER; note = 2'-O-methyladenosine-3'-phosphate
  modified_base 18: mod_base = OTHER; note = 2'-O-methylguanosine-3'-phosphate
  modified_base 19: mod_base = OTHER; note = 2'-O-methyladenosine-3'-phosphate
  modified_base 20: mod_base = OTHER; note = 2'-O-methylcytidine-3'-phosphate
  modified_base 21: mod_base = OTHER; note = 2'-O-methyladenosine
ggcagtaatcaaacgaagaca

SEQ ID NO: 4256 - RNA, 21 nt, synthetic construct
  source 1..21: mol_type = other RNA
  modified_base 1: mod_base = OTHER; note = 2'-O-methylguanosine-3'-phosphate
  modified_base 2: mod_base = OTHER; note = 2'-O-methylcytidine-3'-phosphate
  modified_base 3: mod_base = OTHER; note = 2'-O-methyladenosine-3'-phosphate
  modified_base 4: mod_base = OTHER; note = 2'-O-methylguanosine-3'-phosphate
  modified_base 5: mod_base = OTHER; note = 2'-O-methyluridine-3'-phosphate
  modified_base 6: mod_base = OTHER; note = 2'-O-methyladenosine-3'-phosphate
  modified_base 7: mod_base = OTHER; note = 2'-deoxy-2'-fluoroadenosine-3'-phosphate
  modified_base 8: mod_base = OTHER; note = 2'-O-methyluridine-3'-phosphate
  modified_base 9: mod_base = OTHER; note = 2'-deoxy-2'-fluorocytidine-3'-phosphate
  modified_base 10: mod_base = OTHER; note = 2'-deoxy-2'-fluoroadenosine-3'-phosphate
  modified_base 11: mod_base = OTHER; note = 2'-deoxy-2'-fluoroadenosine-3'-phosphate
  modified_base 12: mod_base = OTHER; note = 2'-O-methyladenosine-3'-phosphate
  modified_base 13: mod_base = OTHER; note = 2'-O-methylcytidine-3'-phosphate
  modified_base 14: mod_base = OTHER; note = 2'-O-methylguanosine-3'-phosphate
  modified_base 15: mod_base = OTHER; note = 2'-O-methyladenosine-3'-phosphate
  modified_base 16: mod_base = OTHER; note = 2'-O-methyladenosine-3'-phosphate
  modified_base 17: mod_base = OTHER; note = 2'-O-methylguanosine-3'-phosphate
  modified_base 18: mod_base = OTHER; note = 2'-O-methyladenosine-3'-phosphate
  modified_base 19: mod_base = OTHER; note = 2'-O-methylcytidine-3'-phosphate
  modified_base 20: mod_base = OTHER; note = 2'-O-methyladenosine-3'-phosphate
  modified_base 21: mod_base = OTHER; note = 2'-O-methyladenosine
gcagtaatcaaacgaagacaa

SEQ ID NO: 4257 - RNA, 21 nt, synthetic construct
  source 1..21: mol_type = other RNA
  modified_base 1: mod_base = OTHER; note = 2'-O-methyladenosine-3'-phosphate
  modified_base 2: mod_base = OTHER; note = 2'-O-methylguanosine-3'-phosphate
  modified_base 3: mod_base = OTHER; note = 2'-O-methyluridine-3'-phosphate
  modified_base 4: mod_base = OTHER; note = 2'-O-methyladenosine-3'-phosphate
  modified_base 5: mod_base = OTHER; note = 2'-O-methyladenosine-3'-phosphate
  modified_base 6: mod_base = OTHER; note = 2'-O-methyluridine-3'-phosphate
  modified_base 7: mod_base = OTHER; note = 2'-deoxy-2'-fluorocytidine-3'-phosphate
  modified_base 8: mod_base = OTHER; note = 2'-O-methyladenosine-3'-phosphate
  modified_base 9: mod_base = OTHER; note = 2'-deoxy-2'-fluoroadenosine-3'-phosphate
  modified_base 10: mod_base = OTHER; note = 2'-deoxy-2'-fluoroadenosine-3'-phosphate
  modified_base 11: mod_base = OTHER; note = 2'-deoxy-2'-fluorocytidine-3'-phosphate
  modified_base 12: mod_base = OTHER; note = 2'-O-methylguanosine-3'-phosphate
  modified_base 13: mod_base = OTHER; note = 2'-O-methyladenosine-3'-phosphate
  modified_base 14: mod_base = OTHER; note = 2'-O-methyladenosine-3'-phosphate
  modified_base 15: mod_base = OTHER; note = 2'-O-methylguanosine-3'-phosphate
  modified_base 16: mod_base = OTHER; note = 2'-O-methyladenosine-3'-phosphate
  modified_base 17: mod_base = OTHER; note = 2'-O-methylcytidine-3'-phosphate
  modified_base 18: mod_base = OTHER; note = 2'-O-methyladenosine-3'-phosphate
  modified_base 19: mod_base = OTHER; note = 2'-O-methylcytidine-3'-phosphate
  modified_base 20: mod_base = OTHER; note = 2'-O-methyluridine-3'-phosphate
  modified_base 21: mod_base = OTHER; note = 2'-O-methyladenosine
agtaatcaaacgaagacacta

SEQ ID NO: 4258 - RNA, 21 nt, synthetic construct
  source 1..21: mol_type = other RNA
  modified_base 1: mod_base = OTHER; note = 2'-O-methyladenosine-3'-phosphate
  modified_base 2: mod_base = OTHER; note = 2'-O-methyladenosine-3'-phosphate
  modified_base 3: mod_base = OTHER; note = 2'-O-methyluridine-3'-phosphate
  modified_base 4: mod_base = OTHER; note = 2'-O-methylcytidine-3'-phosphate
  modified_base 5: mod_base = OTHER; note = 2'-O-methyladenosine-3'-phosphate
  modified_base 6: mod_base = OTHER; note = 2'-O-methyladenosine-3'-phosphate
  modified_base 7: mod_base = OTHER; note = 2'-deoxy-2'-fluoroadenosine-3'-phosphate
  modified_base 8: mod_base = OTHER; note = 2'-O-methylcytidine-3'-phosphate
  modified_base 9: mod_base = OTHER; note = 2'-deoxy-2'-fluoroguanosine-3'-phosphate
  modified_base 10: mod_base = OTHER; note = 2'-deoxy-2'-fluoroadenosine-3'-phosphate
  modified_base 11: mod_base = OTHER; note = 2'-deoxy-2'-fluoroadenosine-3'-phosphate
  modified_base 12: mod_base = OTHER; note = 2'-O-methylguanosine-3'-phosphate
  modified_base 13: mod_base = OTHER; note = 2'-O-methyladenosine-3'-phosphate
  modified_base 14: mod_base = OTHER; note = 2'-O-methylcytidine-3'-phosphate
  modified_base 15: mod_base = OTHER; note = 2'-O-methyladenosine-3'-phosphate
  modified_base 16: mod_base = OTHER; note = 2'-O-methylcytidine-3'-phosphate
  modified_base 17: mod_base = OTHER; note = 2'-O-methyluridine-3'-phosphate
  modified_base 18: mod_base = OTHER; note = 2'-O-methylguanosine-3'-phosphate
  modified_base 19: mod_base = OTHER; note = 2'-O-methyluridine-3'-phosphate
  modified_base 20: mod_base = OTHER; note = 2'-O-methylcytidine-3'-phosphate
  modified_base 21: mod_base = OTHER; note = 2'-O-methyladenosine
aatcaaacgaagacactgtca

SEQ ID NO: 4259 - RNA, 21 nt, synthetic construct
  source 1..21: mol_type = other RNA
  modified_base 1: mod_base = OTHER; note = 2'-O-methyladenosine-3'-phosphate
  modified_base 2: mod_base = OTHER; note = 2'-O-methyluridine-3'-phosphate
  modified_base 3: mod_base = OTHER; note = 2'-O-methylcytidine-3'-phosphate
  modified_base 4: mod_base = OTHER; note = 2'-O-methyladenosine-3'-phosphate
  modified_base 5: mod_base = OTHER; note = 2'-O-methyladenosine-3'-phosphate
  modified_base 6: mod_base = OTHER; note = 2'-O-methyladenosine-3'-phosphate
  modified_base 7: mod_base = OTHER; note = 2'-deoxy-2'-fluorocytidine-3'-phosphate
  modified_base 8: mod_base = OTHER; note = 2'-O-methylguanosine-3'-phosphate
  modified_base 9: mod_base = OTHER; note = 2'-deoxy-2'-fluoroadenosine-3'-phosphate
  modified_base 10: mod_base = OTHER; note = 2'-deoxy-2'-fluoroadenosine-3'-phosphate
  modified_base 11: mod_base = OTHER; note = 2'-deoxy-2'-fluoroguanosine-3'-phosphate
  modified_base 12: mod_base = OTHER; note = 2'-O-methyladenosine-3'-phosphate
  modified_base 13: mod_base = OTHER; note = 2'-O-methylcytidine-3'-phosphate
  modified_base 14: mod_base = OTHER; note = 2'-O-methyladenosine-3'-phosphate
  modified_base 15: mod_base = OTHER; note = 2'-O-methylcytidine-3'-phosphate
  modified_base 16: mod_base = OTHER; note = 2'-O-methyluridine-3'-phosphate
  modified_base 17: mod_base = OTHER; note = 2'-O-methylguanosine-3'-phosphate
  modified_base 18: mod_base = OTHER; note = 2'-O-methyluridine-3'-phosphate
  modified_base 19: mod_base = OTHER; note = 2'-O-methylcytidine-3'-phosphate
  modified_base 20: mod_base = OTHER; note = 2'-O-methylcytidine-3'-phosphate
  modified_base 21: mod_base = OTHER; note = 2'-O-methyladenosine
atcaaacgaagacactgtcca

SEQ ID NO: 4260 - RNA, 21 nt, synthetic construct
  source 1..21: mol_type = other RNA
  modified_base 1: mod_base = OTHER; note = 2'-O-methyladenosine-3'-phosphate
  modified_base 2: mod_base = OTHER; note = 2'-O-methylcytidine-3'-phosphate
  modified_base 3: mod_base = OTHER; note = 2'-O-methylguanosine-3'-phosphate
  modified_base 4: mod_base = OTHER; note = 2'-O-methylcytidine-3'-phosphate
  modified_base 5: mod_base = OTHER; note = 2'-O-methylcytidine-3'-phosphate
  modified_base 6: mod_base = OTHER; note = 2'-O-methyladenosine-3'-phosphate
  modified_base 7: mod_base = OTHER; note = 2'-deoxy-2'-fluoroadenosine-3'-phosphate
  modified_base 8: mod_base = OTHER; note = 2'-O-methyladenosine-3'-phosphate
  modified_base 9: mod_base = OTHER; note = 2'-deoxy-2'-fluorocytidine-3'-phosphate
  modified_base 10: mod_base = OTHER; note = 2'-deoxy-2'-fluorocytidine-3'-phosphate
  modified_base 11: mod_base = OTHER; note = 2'-deoxy-2'-fluorouridine-3'-phosphate
  modified_base 12: mod_base = OTHER; note = 2'-O-methylcytidine-3'-phosphate
  modified_base 13: mod_base = OTHER; note = 2'-O-methylguanosine-3'-phosphate
  modified_base 14: mod_base = OTHER; note = 2'-O-methylguanosine-3'-phosphate
  modified_base 15: mod_base = OTHER; note = 2'-O-methylcytidine-3'-phosphate
  modified_base 16: mod_base = OTHER; note = 2'-O-methyladenosine-3'-phosphate
  modified_base 17: mod_base = OTHER; note = 2'-O-methyluridine-3'-phosphate
  modified_base 18: mod_base = OTHER; note = 2'-O-methyluridine-3'-phosphate
  modified_base 19: mod_base = OTHER; note = 2'-O-methyluridine-3'-phosphate
  modified_base 20: mod_base = OTHER; note = 2'-O-methyluridine-3'-phosphate
  modified_base 21: mod_base = OTHER; note = 2'-O-methyladenosine
acgccaaacctcggcatttta

SEQ ID NO: 4261 - RNA, 21 nt, synthetic construct
  source 1..21: mol_type = other RNA
  modified_base 1: mod_base = OTHER; note = 2'-O-methylcytidine-3'-phosphate
  modified_base 2: mod_base = OTHER; note = 2'-O-methylguanosine-3'-phosphate
  modified_base 3: mod_base = OTHER; note = 2'-O-methylcytidine-3'-phosphate
  modified_base 4: mod_base = OTHER; note = 2'-O-methylcytidine-3'-phosphate
  modified_base 5: mod_base = OTHER; note = 2'-O-methyladenosine-3'-phosphate
  modified_base 6: mod_base = OTHER; note = 2'-O-methyladenosine-3'-phosphate
  modified_base 7: mod_base = OTHER; note = 2'-deoxy-2'-fluoroadenosine-3'-phosphate
  modified_base 8: mod_base = OTHER; note = 2'-O-methylcytidine-3'-phosphate
  modified_base 9: mod_base = OTHER; note = 2'-deoxy-2'-fluorocytidine-3'-phosphate
  modified_base 10: mod_base = OTHER; note = 2'-deoxy-2'-fluorouridine-3'-phosphate
  modified_base 11: mod_base = OTHER; note = 2'-deoxy-2'-fluorocytidine-3'-phosphate
  modified_base 12: mod_base = OTHER; note = 2'-O-methylguanosine-3'-phosphate
  modified_base 13: mod_base = OTHER; note = 2'-O-methylguanosine-3'-phosphate
  modified_base 14: mod_base = OTHER; note = 2'-O-methylcytidine-3'-phosphate
  modified_base 15: mod_base = OTHER; note = 2'-O-methyladenosine-3'-phosphate
  modified_base 16: mod_base = OTHER; note = 2'-O-methyluridine-3'-phosphate
  modified_base 17: mod_base = OTHER; note = 2'-O-methyluridine-3'-phosphate
  modified_base 18: mod_base = OTHER; note = 2'-O-methyluridine-3'-phosphate
  modified_base 19: mod_base = OTHER; note = 2'-O-methyluridine-3'-phosphate
  modified_base 20: mod_base = OTHER; note = 2'-O-methyluridine-3'-phosphate
  modified_base 21: mod_base = OTHER; note = 2'-O-methyladenosine
cgccaaacctcggcattttta

SEQ ID NO: 4262 - RNA, 21 nt, synthetic construct
  source 1..21: mol_type = other RNA
  modified_base 1: mod_base = OTHER; note = 2'-O-methylguanosine-3'-phosphate
  modified_base 2: mod_base = OTHER; note = 2'-O-methylcytidine-3'-phosphate
  modified_base 3: mod_base = OTHER; note = 2'-O-methylcytidine-3'-phosphate
  modified_base 4: mod_base = OTHER; note = 2'-O-methyladenosine-3'-phosphate
  modified_base 5: mod_base = OTHER; note = 2'-O-methyladenosine-3'-phosphate
  modified_base 6: mod_base = OTHER; note = 2'-O-methyladenosine-3'-phosphate
  modified_base 7: mod_base = OTHER; note = 2'-deoxy-2'-fluorocytidine-3'-phosphate
  modified_base 8: mod_base = OTHER; note = 2'-O-methylcytidine-3'-phosphate
  modified_base 9: mod_base = OTHER; note = 2'-deoxy-2'-fluorouridine-3'-phosphate
  modified_base 10: mod_base = OTHER; note = 2'-deoxy-2'-fluorocytidine-3'-phosphate
  modified_base 11: mod_base = OTHER; note = 2'-deoxy-2'-fluoroguanosine-3'-phosphate
  modified_base 12: mod_base = OTHER; note = 2'-O-methylguanosine-3'-phosphate
  modified_base 13: mod_base = OTHER; note = 2'-O-methylcytidine-3'-phosphate
  modified_base 14: mod_base = OTHER; note = 2'-O-methyladenosine-3'-phosphate
  modified_base 15: mod_base = OTHER; note = 2'-O-methyluridine-3'-phosphate
  modified_base 16: mod_base = OTHER; note = 2'-O-methyluridine-3'-phosphate
  modified_base 17: mod_base = OTHER; note = 2'-O-methyluridine-3'-phosphate
  modified_base 18: mod_base = OTHER; note = 2'-O-methyluridine-3'-phosphate
  modified_base 19: mod_base = OTHER; note = 2'-O-methyluridine-3'-phosphate
  modified_base 20: mod_base = OTHER; note = 2'-O-methyluridine-3'-phosphate
  modified_base 21: mod_base = OTHER; note = 2'-O-methyladenosine
gccaaacctcggcatttttta

SEQ ID NO: 4263 - RNA, 21 nt, synthetic construct
  source 1..21: mol_type = other RNA
  modified_base 1: mod_base = OTHER; note = 2'-O-methylcytidine-3'-phosphate
  modified_base 2: mod_base = OTHER; note = 2'-O-methylcytidine-3'-phosphate
  modified_base 3: mod_base = OTHER; note = 2'-O-methyladenosine-3'-phosphate
  modified_base 4: mod_base = OTHER; note = 2'-O-methyladenosine-3'-phosphate
  modified_base 5: mod_base = OTHER; note = 2'-O-methyladenosine-3'-phosphate
  modified_base 6: mod_base = OTHER; note = 2'-O-methylcytidine-3'-phosphate
  modified_base 7: mod_base = OTHER; note = 2'-deoxy-2'-fluorocytidine-3'-phosphate
  modified_base 8: mod_base = OTHER; note = 2'-O-methyluridine-3'-phosphate
  modified_base 9: mod_base = OTHER; note = 2'-deoxy-2'-fluorocytidine-3'-phosphate
  modified_base 10: mod_base = OTHER; note = 2'-deoxy-2'-fluoroguanosine-3'-phosphate
  modified_base 11: mod_base = OTHER; note = 2'-deoxy-2'-fluoroguanosine-3'-phosphate
  modified_base 12: mod_base = OTHER; note = 2'-O-methylcytidine-3'-phosphate
  modified_base 13: mod_base = OTHER; note = 2'-O-methyladenosine-3'-phosphate
  modified_base 14: mod_base = OTHER; note = 2'-O-methyluridine-3'-phosphate
  modified_base 15: mod_base = OTHER; note = 2'-O-methyluridine-3'-phosphate
  modified_base 16: mod_base = OTHER; note = 2'-O-methyluridine-3'-phosphate
  modified_base 17: mod_base = OTHER; note = 2'-O-methyluridine-3'-phosphate
  modified_base 18: mod_base = OTHER; note = 2'-O-methyluridine-3'-phosphate
  modified_base 19: mod_base = OTHER; note = 2'-O-methyluridine-3'-phosphate
  modified_base 20: mod_base = OTHER; note = 2'-O-methylguanosine-3'-phosphate
  modified_base 21: mod_base = OTHER; note = 2'-O-methyladenosine
ccaaacctcggcattttttga

SEQ ID NO: 4264 - RNA, 21 nt, synthetic construct
  source 1..21: mol_type = other RNA
  modified_base 1: mod_base = OTHER; note = 2'-O-methylcytidine-3'-phosphate
  modified_base 2: mod_base = OTHER; note = 2'-O-methyladenosine-3'-phosphate
  modified_base 3: mod_base = OTHER; note = 2'-O-methyladenosine-3'-phosphate
  modified_base 4: mod_base = OTHER; note = 2'-O-methyladenosine-3'-phosphate
  modified_base 5: mod_base = OTHER; note = 2'-O-methylcytidine-3'-phosphate
  modified_base 6: mod_base = OTHER; note = 2'-O-methylcytidine-3'-phosphate
  modified_base 7: mod_base = OTHER; note = 2'-deoxy-2'-fluorouridine-3'-phosphate
  modified_base 8: mod_base = OTHER; note = 2'-O-methylcytidine-3'-phosphate
  modified_base 9: mod_base = OTHER; note = 2'-deoxy-2'-fluoroguanosine-3'-phosphate
  modified_base 10: mod_base = OTHER; note = 2'-deoxy-2'-fluoroguanosine-3'-phosphate
  modified_base 11: mod_base = OTHER; note = 2'-deoxy-2'-fluorocytidine-3'-phosphate
  modified_base 12: mod_base = OTHER; note = 2'-O-methyladenosine-3'-phosphate
  modified_base 13: mod_base = OTHER; note = 2'-O-methyluridine-3'-phosphate
  modified_base 14: mod_base = OTHER; note = 2'-O-methyluridine-3'-phosphate
  modified_base 15: mod_base = OTHER; note = 2'-O-methyluridine-3'-phosphate
  modified_base 16: mod_base = OTHER; note = 2'-O-methyluridine-3'-phosphate
  modified_base 17: mod_base = OTHER; note = 2'-O-methyluridine-3'-phosphate
  modified_base 18: mod_base = OTHER; note = 2'-O-methyluridine-3'-phosphate
  modified_base 19: mod_base = OTHER; note = 2'-O-methylguanosine-3'-phosphate
  modified_base 20: mod_base = OTHER; note = 2'-O-methyluridine-3'-phosphate
  modified_base 21: mod_base = OTHER; note = 2'-O-methyladenosine
caaacctcggcattttttgta

SEQ ID NO: 4265 - RNA, 21 nt, synthetic construct
  source 1..21: mol_type = other RNA
  modified_base 1: mod_base = OTHER; note = 2'-O-methyladenosine-3'-phosphate
  modified_base 2: mod_base = OTHER; note = 2'-O-methyladenosine-3'-phosphate
  modified_base 3: mod_base = OTHER; note = 2'-O-methyladenosine-3'-phosphate
  modified_base 4: mod_base = OTHER; note = 2'-O-methylcytidine-3'-phosphate
  modified_base 5: mod_base = OTHER; note = 2'-O-methylcytidine-3'-phosphate
  modified_base 6: mod_base = OTHER; note = 2'-O-methyluridine-3'-phosphate
  modified_base 7: mod_base = OTHER; note = 2'-deoxy-2'-fluorocytidine-3'-phosphate
  modified_base 8: mod_base = OTHER; note = 2'-O-methylguanosine-3'-phosphate
  modified_base 9: mod_base = OTHER; note = 2'-deoxy-2'-fluoroguanosine-3'-phosphate
  modified_base 10: mod_base = OTHER; note = 2'-deoxy-2'-fluorocytidine-3'-phosphate
  modified_base 11: mod_base = OTHER; note = 2'-deoxy-2'-fluoroadenosine-3'-phosphate
  modified_base 12: mod_base = OTHER; note = 2'-O-methyluridine-3'-phosphate
  modified_base 13: mod_base = OTHER; note = 2'-O-methyluridine-3'-phosphate
  modified_base 14: mod_base = OTHER; note = 2'-O-methyluridine-3'-phosphate
  modified_base 15: mod_base = OTHER; note = 2'-O-methyluridine-3'-phosphate
  modified_base 16: mod_base = OTHER; note = 2'-O-methyluridine-3'-phosphate
  modified_base 17: mod_base = OTHER; note = 2'-O-methyluridine-3'-phosphate
  modified_base 18: mod_base = OTHER; note = 2'-O-methylguanosine-3'-phosphate
  modified_base 19: mod_base = OTHER; note = 2'-O-methyluridine-3'-phosphate
  modified_base 20: mod_base = OTHER; note = 2'-O-methylguanosine-3'-phosphate
  modified_base 21: mod_base = OTHER; note = 2'-O-methyladenosine
aaacctcggcattttttgtga

SEQ ID NO: 4266 - RNA, 21 nt, synthetic construct
  source 1..21: mol_type = other RNA
  modified_base 1: mod_base = OTHER; note = 2'-O-methyladenosine-3'-phosphate
  modified_base 2: mod_base = OTHER; note = 2'-O-methyladenosine-3'-phosphate
  modified_base 3: mod_base = OTHER; note = 2'-O-methylcytidine-3'-phosphate
  modified_base 4: mod_base = OTHER; note = 2'-O-methylcytidine-3'-phosphate
  modified_base 5: mod_base = OTHER; note = 2'-O-methyluridine-3'-phosphate
  modified_base 6: mod_base = OTHER; note = 2'-O-methylcytidine-3'-phosphate
  modified_base 7: mod_base = OTHER; note = 2'-deoxy-2'-fluoroguanosine-3'-phosphate
  modified_base 8: mod_base = OTHER; note = 2'-O-methylguanosine-3'-phosphate
  modified_base 9: mod_base = OTHER; note = 2'-deoxy-2'-fluorocytidine-3'-phosphate
  modified_base 10: mod_base = OTHER; note = 2'-deoxy-2'-fluoroadenosine-3'-phosphate
  modified_base 11: mod_base = OTHER; note = 2'-deoxy-2'-fluorouridine-3'-phosphate
  modified_base 12: mod_base = OTHER; note = 2'-O-methyluridine-3'-phosphate
  modified_base 13: mod_base = OTHER; note = 2'-O-methyluridine-3'-phosphate
  modified_base 14: mod_base = OTHER; note = 2'-O-methyluridine-3'-phosphate
  modified_base 15: mod_base = OTHER; note = 2'-O-methyluridine-3'-phosphate
  modified_base 16: mod_base = OTHER; note = 2'-O-methyluridine-3'-phosphate
  modified_base 17: mod_base = OTHER; note = 2'-O-methylguanosine-3'-phosphate
  modified_base 18: mod_base = OTHER; note = 2'-O-methyluridine-3'-phosphate
  modified_base 19: mod_base = OTHER; note = 2'-O-methylguanosine-3'-phosphate
  modified_base 20: mod_base = OTHER; note = 2'-O-methyluridine-3'-phosphate
  modified_base 21: mod_base = OTHER; note = 2'-O-methyladenosine
aacctcggcattttttgtgta

SEQ ID NO: 4267 - RNA, 21 nt, synthetic construct
  source 1..21: mol_type = other RNA
  modified_base 1: mod_base = OTHER; note = 2'-O-methyladenosine-3'-phosphate
  modified_base 2: mod_base = OTHER; note = 2'-O-methylcytidine-3'-phosphate
  modified_base 3: mod_base = OTHER; note = 2'-O-methylcytidine-3'-phosphate
  modified_base 4: mod_base = OTHER; note = 2'-O-methyluridine-3'-phosphate
  modified_base 5: mod_base = OTHER; note = 2'-O-methylcytidine-3'-phosphate
  modified_base 6: mod_base = OTHER; note = 2'-O-methylguanosine-3'-phosphate
  modified_base 7: mod_base = OTHER; note = 2'-deoxy-2'-fluoroguanosine-3'-phosphate
  modified_base 8: mod_base = OTHER; note = 2'-O-methylcytidine-3'-phosphate
  modified_base 9: mod_base = OTHER; note = 2'-deoxy-2'-fluoroadenosine-3'-phosphate
  modified_base 10: mod_base = OTHER; note = 2'-deoxy-2'-fluorouridine-3'-phosphate
  modified_base 11: mod_base = OTHER; note = 2'-deoxy-2'-fluorouridine-3'-phosphate
  modified_base 12: mod_base = OTHER; note = 2'-O-methyluridine-3'-phosphate
  modified_base 13: mod_base = OTHER; note = 2'-O-methyluridine-3'-phosphate
  modified_base 14: mod_base = OTHER; note = 2'-O-methyluridine-3'-phosphate
  modified_base 15: mod_base = OTHER; note = 2'-O-methyluridine-3'-phosphate
  modified_base 16: mod_base = OTHER; note = 2'-O-methylguanosine-3'-phosphate
  modified_base 17: mod_base = OTHER; note = 2'-O-methyluridine-3'-phosphate
  modified_base 18: mod_base = OTHER; note = 2'-O-methylguanosine-3'-phosphate
  modified_base 19: mod_base = OTHER; note = 2'-O-methyluridine-3'-phosphate
  modified_base 20: mod_base = OTHER; note = 2'-O-methyluridine-3'-phosphate
  modified_base 21: mod_base = OTHER; note = 2'-O-methyladenosine
acctcggcattttttgtgtta

SEQ ID NO: 4268 - RNA, 21 nt, synthetic construct
  source 1..21: mol_type = other RNA
  modified_base 1: mod_base = OTHER; note = 2'-O-methylcytidine-3'-phosphate
  modified_base 2: mod_base = OTHER; note = 2'-O-methylcytidine-3'-phosphate
  modified_base 3: mod_base = OTHER; note = 2'-O-methyluridine-3'-phosphate
  modified_base 4: mod_base = OTHER; note = 2'-O-methylcytidine-3'-phosphate
  modified_base 5: mod_base = OTHER; note = 2'-O-methylguanosine-3'-phosphate
  modified_base 6: mod_base = OTHER; note = 2'-O-methylguanosine-3'-phosphate
  modified_base 7: mod_base = OTHER; note = 2'-deoxy-2'-fluorocytidine-3'-phosphate
  modified_base 8: mod_base = OTHER; note = 2'-O-methyladenosine-3'-phosphate
  modified_base 9: mod_base = OTHER; note = 2'-deoxy-2'-fluorouridine-3'-phosphate
  modified_base 10: mod_base = OTHER; note = 2'-deoxy-2'-fluorouridine-3'-phosphate
  modified_base 11: mod_base = OTHER; note = 2'-deoxy-2'-fluorouridine-3'-phosphate
  modified_base 12: mod_base = OTHER; note = 2'-O-methyluridine-3'-phosphate
  modified_base 13: mod_base = OTHER; note = 2'-O-methyluridine-3'-phosphate
  modified_base 14: mod_base = OTHER; note = 2'-O-methyluridine-3'-phosphate
  modified_base 15: mod_base = OTHER; note = 2'-O-methylguanosine-3'-phosphate
  modified_base 16: mod_base = OTHER; note = 2'-O-methyluridine-3'-phosphate
  modified_base 17: mod_base = OTHER; note = 2'-O-methylguanosine-3'-phosphate
  modified_base 18: mod_base = OTHER; note = 2'-O-methyluridine-3'-phosphate
  modified_base 19: mod_base = OTHER; note = 2'-O-methyluridine-3'-phosphate
  modified_base 20: mod_base = OTHER; note = 2'-O-methyladenosine-3'-phosphate
  modified_base 21: mod_base = OTHER; note = 2'-O-methyladenosine
cctcggcattttttgtgttaa

SEQ ID NO: 4269 - RNA, 21 nt, synthetic construct
  source 1..21: mol_type = other RNA
  modified_base 1: mod_base = OTHER; note = 2'-O-methylcytidine-3'-phosphate
  modified_base 2: mod_base = OTHER; note = 2'-O-methyluridine-3'-phosphate
  modified_base 3: mod_base = OTHER; note = 2'-O-methylcytidine-3'-phosphate
  modified_base 4: mod_base = OTHER; note = 2'-O-methylguanosine-3'-phosphate
  modified_base 5: mod_base = OTHER; note = 2'-O-methylguanosine-3'-phosphate
  modified_base 6: mod_base = OTHER; note = 2'-O-methylcytidine-3'-phosphate
  modified_base 7: mod_base = OTHER; note = 2'-deoxy-2'-fluoroadenosine-3'-phosphate
  modified_base 8: mod_base = OTHER; note = 2'-O-methyluridine-3'-phosphate
  modified_base 9: mod_base = OTHER; note = 2'-deoxy-2'-fluorouridine-3'-phosphate
  modified_base 10: mod_base = OTHER; note = 2'-deoxy-2'-fluorouridine-3'-phosphate
  modified_base 11: mod_base = OTHER; note = 2'-deoxy-2'-fluorouridine-3'-phosphate
  modified_base 12: mod_base = OTHER; note = 2'-O-methyluridine-3'-phosphate
  modified_base 13: mod_base = OTHER; note = 2'-O-methyluridine-3'-phosphate
  modified_base 14: mod_base = OTHER; note = 2'-O-methylguanosine-3'-phosphate
  modified_base 15: mod_base = OTHER; note = 2'-O-methyluridine-3'-phosphate
  modified_base 16: mod_base = OTHER; note = 2'-O-methylguanosine-3'-phosphate
  modified_base 17: mod_base = OTHER; note = 2'-O-methyluridine-3'-phosphate
  modified_base 18: mod_base = OTHER; note = 2'-O-methyluridine-3'-phosphate
  modified_base 19: mod_base = OTHER; note = 2'-O-methyladenosine-3'-phosphate
  modified_base 20: mod_base = OTHER; note = 2'-O-methyluridine-3'-phosphate
  modified_base 21: mod_base = OTHER; note = 2'-O-methyladenosine
ctcggcattttttgtgttata

SEQ ID NO: 4270 - RNA, 21 nt, synthetic construct
  source 1..21: mol_type = other RNA
  modified_base 1: mod_base = OTHER; note = 2'-O-methyluridine-3'-phosphate
  modified_base 2: mod_base = OTHER; note = 2'-O-methylcytidine-3'-phosphate
  modified_base 3: mod_base = OTHER; note = 2'-O-methylguanosine-3'-phosphate
  modified_base 4: mod_base = OTHER; note = 2'-O-methylguanosine-3'-phosphate
  modified_base 5: mod_base = OTHER; note = 2'-O-methylcytidine-3'-phosphate
  modified_base 6: mod_base = OTHER; note = 2'-O-methyladenosine-3'-phosphate
  modified_base 7: mod_base = OTHER; note = 2'-deoxy-2'-fluorouridine-3'-phosphate
  modified_base 8: mod_base = OTHER; note = 2'-O-methyluridine-3'-phosphate
  modified_base 9: mod_base = OTHER; note = 2'-deoxy-2'-fluorouridine-3'-phosphate
  modified_base 10: mod_base = OTHER; note = 2'-deoxy-2'-fluorouridine-3'-phosphate
  modified_base 11: mod_base = OTHER; note = 2'-deoxy-2'-fluorouridine-3'-phosphate
  modified_base 12: mod_base = OTHER; note = 2'-O-methyluridine-3'-phosphate
  modified_base 13: mod_base = OTHER; note = 2'-O-methylguanosine-3'-phosphate
  modified_base 14: mod_base = OTHER; note = 2'-O-methyluridine-3'-phosphate
  modified_base 15: mod_base = OTHER; note = 2'-O-methylguanosine-3'-phosphate
  modified_base 16: mod_base = OTHER; note = 2'-O-methyluridine-3'-phosphate
  modified_base 17: mod_base = OTHER; note = 2'-O-methyluridine-3'-phosphate
  modified_base 18: mod_base = OTHER; note = 2'-O-methyladenosine-3'-phosphate
  modified_base 19: mod_base = OTHER; note = 2'-O-methyluridine-3'-phosphate
  modified_base 20: mod_base = OTHER; note = 2'-O-methyluridine-3'-phosphate
  modified_base 21: mod_base = OTHER; note = 2'-O-methyladenosine
tcggcattttttgtgttatta

SEQ ID NO: 4271 - RNA, 21 nt, synthetic construct
  source 1..21: mol_type = other RNA
  modified_base 1: mod_base = OTHER; note = 2'-O-methylguanosine-3'-phosphate
  modified_base 2: mod_base = OTHER; note = 2'-O-methylguanosine-3'-phosphate
  modified_base 3: mod_base = OTHER; note = 2'-O-methylcytidine-3'-phosphate
  modified_base 4: mod_base = OTHER; note = 2'-O-methyladenosine-3'-phosphate
  modified_base 5: mod_base = OTHER; note = 2'-O-methyluridine-3'-phosphate
  modified_base 6: mod_base = OTHER; note = 2'-O-methyluridine-3'-phosphate
  modified_base 7: mod_base = OTHER; note = 2'-deoxy-2'-fluorouridine-3'-phosphate
  modified_base 8: mod_base = OTHER; note = 2'-O-methyluridine-3'-phosphate
  modified_base 9: mod_base = OTHER; note = 2'-deoxy-2'-fluorouridine-3'-phosphate
  modified_base 10: mod_base = OTHER; note = 2'-deoxy-2'-fluorouridine-3'-phosphate
  modified_base 11: mod_base = OTHER; note = 2'-deoxy-2'-fluoroguanosine-3'-phosphate
  modified_base 12: mod_base = OTHER; note = 2'-O-methyluridine-3'-phosphate
  modified_base 13: mod_base = OTHER; note = 2'-O-methylguanosine-3'-phosphate
  modified_base 14: mod_base = OTHER; note = 2'-O-methyluridine-3'-phosphate
  modified_base 15: mod_base = OTHER; note = 2'-O-methyluridine-3'-phosphate
  modified_base 16: mod_base = OTHER; note = 2'-O-methyladenosine-3'-phosphate
  modified_base 17: mod_base = OTHER; note = 2'-O-methyluridine-3'-phosphate
  modified_base 18: mod_base = OTHER; note = 2'-O-methyluridine-3'-phosphate
  modified_base 19: mod_base = OTHER; note = 2'-O-methyluridine-3'-phosphate
  modified_base 20: mod_base = OTHER; note = 2'-O-methyluridine-3'-phosphate
  modified_base 21: mod_base = OTHER; note = 2'-O-methyladenosine
ggcattttttgtgttatttta

SEQ ID NO: 4272 - RNA, 21 nt, synthetic construct
  source 1..21: mol_type = other RNA
  modified_base 1: mod_base = OTHER; note = 2'-O-methylguanosine-3'-phosphate
  modified_base 2: mod_base = OTHER; note = 2'-O-methylcytidine-3'-phosphate
  modified_base 3: mod_base = OTHER; note = 2'-O-methyladenosine-3'-phosphate
  modified_base 4: mod_base = OTHER; note = 2'-O-methyluridine-3'-phosphate
  modified_base 5: mod_base = OTHER; note = 2'-O-methyluridine-3'-phosphate
  modified_base 6: mod_base = OTHER; note = 2'-O-methyluridine-3'-phosphate
  modified_base 7: mod_base = OTHER; note = 2'-deoxy-2'-fluorouridine-3'-phosphate
  modified_base 8: mod_base = OTHER; note = 2'-O-methyluridine-3'-phosphate
  modified_base 9: mod_base = OTHER; note = 2'-deoxy-2'-fluorouridine-3'-phosphate
  modified_base 10: mod_base = OTHER; note = 2'-deoxy-2'-fluoroguanosine-3'-phosphate
  modified_base 11: mod_base = OTHER; note = 2'-deoxy-2'-fluorouridine-3'-phosphate
  modified_base 12: mod_base = OTHER; note = 2'-O-methylguanosine-3'-phosphate
  modified_base 13: mod_base = OTHER; note = 2'-O-methyluridine-3'-phosphate
  modified_base 14: mod_base = OTHER; note = 2'-O-methyluridine-3'-phosphate
  modified_base 15: mod_base = OTHER; note = 2'-O-methyladenosine-3'-phosphate
  modified_base 16: mod_base = OTHER; note = 2'-O-methyluridine-3'-phosphate
  modified_base 17: mod_base = OTHER; note = 2'-O-methyluridine-3'-phosphate
  modified_base 18: mod_base = OTHER; note = 2'-O-methyluridine-3'-phosphate
  modified_base 19: mod_base = OTHER; note = 2'-O-methyluridine-3'-phosphate
  modified_base 20: mod_base = OTHER; note = 2'-O-methylcytidine-3'-phosphate
  modified_base 21: mod_base = OTHER; note = 2'-O-methyladenosine
gcattttttgtgttattttca

SEQ ID NO: 4273 - RNA, 21 nt, synthetic construct
  source 1..21: mol_type = other RNA
  modified_base 1: mod_base = OTHER; note = 2'-O-methylcytidine-3'-phosphate
  modified_base 2: mod_base = OTHER; note = 2'-O-methyladenosine-3'-phosphate
  modified_base 3: mod_base = OTHER; note = 2'-O-methyluridine-3'-phosphate
  modified_base 4: mod_base = OTHER; note = 2'-O-methyluridine-3'-phosphate
  modified_base 5: mod_base = OTHER; note = 2'-O-methyluridine-3'-phosphate
  modified_base 6: mod_base = OTHER; note = 2'-O-methyluridine-3'-phosphate
  modified_base 7: mod_base = OTHER; note = 2'-deoxy-2'-fluorouridine-3'-phosphate
  modified_base 8: mod_base = OTHER; note = 2'-O-methyluridine-3'-phosphate
  modified_base 9: mod_base = OTHER; note = 2'-deoxy-2'-fluoroguanosine-3'-phosphate
  modified_base 10: mod_base = OTHER; note = 2'-deoxy-2'-fluorouridine-3'-phosphate
  modified_base 11: mod_base = OTHER; note = 2'-deoxy-2'-fluoroguanosine-3'-phosphate
  modified_base 12: mod_base = OTHER; note = 2'-O-methyluridine-3'-phosphate
  modified_base 13: mod_base = OTHER; note = 2'-O-methyluridine-3'-phosphate
  modified_base 14: mod_base = OTHER; note = 2'-O-methyladenosine-3'-phosphate
  modified_base 15: mod_base = OTHER; note = 2'-O-methyluridine-3'-phosphate
  modified_base 16: mod_base = OTHER; note = 2'-O-methyluridine-3'-phosphate
  modified_base 17: mod_base = OTHER; note = 2'-O-methyluridine-3'-phosphate
  modified_base 18: mod_base = OTHER; note = 2'-O-methyluridine-3'-phosphate
  modified_base 19: mod_base = OTHER; note = 2'-O-methylcytidine-3'-phosphate
  modified_base 20: mod_base = OTHER; note = 2'-O-methyluridine-3'-phosphate
  modified_base 21: mod_base = OTHER; note = 2'-O-methyladenosine
cattttttgtgttattttcta

SEQ ID NO: 4274 - RNA, 21 nt, synthetic construct
  source 1..21: mol_type = other RNA
  modified_base 1: mod_base = OTHER; note = 2'-O-methyluridine-3'-phosphate
  modified_base 2: mod_base = OTHER; note = 2'-O-methyluridine-3'-phosphate
  modified_base 3: mod_base = OTHER; note = 2'-O-methyluridine-3'-phosphate
  modified_base 4: mod_base = OTHER; note = 2'-O-methylguanosine-3'-phosphate
  modified_base 5: mod_base = OTHER; note = 2'-O-methyluridine-3'-phosphate
  modified_base 6: mod_base = OTHER; note = 2'-O-methylguanosine-3'-phosphate
  modified_base 7: mod_base = OTHER; note = 2'-deoxy-2'-fluorouridine-3'-phosphate
  modified_base 8: mod_base = OTHER; note = 2'-O-methyluridine-3'-phosphate
  modified_base 9: mod_base = OTHER; note = 2'-deoxy-2'-fluoroadenosine-3'-phosphate
  modified_base 10: mod_base = OTHER; note = 2'-deoxy-2'-fluorouridine-3'-phosphate
  modified_base 11: mod_base = OTHER; note = 2'-deoxy-2'-fluorouridine-3'-phosphate
  modified_base 12: mod_base = OTHER; note = 2'-O-methyluridine-3'-phosphate
  modified_base 13: mod_base = OTHER; note = 2'-O-methyluridine-3'-phosphate
  modified_base 14: mod_base = OTHER; note = 2'-O-methylcytidine-3'-phosphate
  modified_base 15: mod_base = OTHER; note = 2'-O-methyluridine-3'-phosphate
  modified_base 16: mod_base = OTHER; note = 2'-O-methylguanosine-3'-phosphate
  modified_base 17: mod_base = OTHER; note = 2'-O-methyladenosine-3'-phosphate
  modified_base 18: mod_base = OTHER; note = 2'-O-methylcytidine-3'-phosphate
  modified_base 19: mod_base = OTHER; note = 2'-O-methyluridine-3'-phosphate
  modified_base 20: mod_base = OTHER; note = 2'-O-methylguanosine-3'-phosphate
  modified_base 21: mod_base = OTHER; note = 2'-O-methyladenosine
tttgtgttattttctgactga

SEQ ID NO: 4275 - RNA, 21 nt, synthetic construct
  source 1..21: mol_type = other RNA
  modified_base 1: mod_base = OTHER; note = 2'-O-methyluridine-3'-phosphate
  modified_base 2: mod_base = OTHER; note = 2'-O-methyluridine-3'-phosphate
  modified_base 3: mod_base = OTHER; note = 2'-O-methylguanosine-3'-phosphate
  modified_base 4: mod_base = OTHER; note = 2'-O-methyluridine-3'-phosphate
  modified_base 5: mod_base = OTHER; note = 2'-O-methylguanosine-3'-phosphate
  modified_base 6: mod_base = OTHER; note = 2'-O-methyluridine-3'-phosphate
  modified_base 7: mod_base = OTHER; note = 2'-deoxy-2'-fluorouridine-3'-phosphate
  modified_base 8: mod_base = OTHER; note = 2'-O-methyladenosine-3'-phosphate
  modified_base 9: mod_base = OTHER; note = 2'-deoxy-2'-fluorouridine-3'-phosphate
  modified_base 10: mod_base = OTHER; note = 2'-deoxy-2'-fluorouridine-3'-phosphate
  modified_base 11: mod_base = OTHER; note = 2'-deoxy-2'-fluorouridine-3'-phosphate
  modified_base 12: mod_base = OTHER; note = 2'-O-methyluridine-3'-phosphate
  modified_base 13: mod_base = OTHER; note = 2'-O-methylcytidine-3'-phosphate
  modified_base 14: mod_base = OTHER; note = 2'-O-methyluridine-3'-phosphate
  modified_base 15: mod_base = OTHER; note = 2'-O-methylguanosine-3'-phosphate
  modified_base 16: mod_base = OTHER; note = 2'-O-methyladenosine-3'-phosphate
  modified_base 17: mod_base = OTHER; note = 2'-O-methylcytidine-3'-phosphate
  modified_base 18: mod_base = OTHER; note = 2'-O-methyluridine-3'-phosphate
  modified_base 19: mod_base = OTHER; note = 2'-O-methylguanosine-3'-phosphate
  modified_base 20: mod_base = OTHER; note = 2'-O-methylcytidine-3'-phosphate
  modified_base 21: mod_base = OTHER; note = 2'-O-methyladenosine
ttgtgttattttctgactgca

SEQ ID NO: 4276 - RNA, 21 nt, synthetic construct
  source 1..21: mol_type = other RNA
  modified_base 1: mod_base = OTHER; note = 2'-O-methyluridine-3'-phosphate
  modified_base 2: mod_base = OTHER; note = 2'-O-methylguanosine-3'-phosphate
  modified_base 3: mod_base = OTHER; note = 2'-O-methyluridine-3'-phosphate
  modified_base 4: mod_base = OTHER; note = 2'-O-methylguanosine-3'-phosphate
  modified_base 5: mod_base = OTHER; note = 2'-O-methyluridine-3'-phosphate
  modified_base 6: mod_base = OTHER; note = 2'-O-methyluridine-3'-phosphate
  modified_base 7: mod_base = OTHER; note = 2'-deoxy-2'-fluoroadenosine-3'-phosphate
  modified_base 8: mod_base = OTHER; note = 2'-O-methyluridine-3'-phosphate
  modified_base 9: mod_base = OTHER; note = 2'-deoxy-2'-fluorouridine-3'-phosphate
  modified_base 10: mod_base = OTHER; note = 2'-deoxy-2'-fluorouridine-3'-phosphate
  modified_base 11: mod_base = OTHER; note = 2'-deoxy-2'-fluorouridine-3'-phosphate
  modified_base 12: mod_base = OTHER; note = 2'-O-methylcytidine-3'-phosphate
  modified_base 13: mod_base = OTHER; note = 2'-O-methyluridine-3'-phosphate
  modified_base 14: mod_base = OTHER; note = 2'-O-methylguanosine-3'-phosphate
  modified_base 15: mod_base = OTHER; note = 2'-O-methyladenosine-3'-phosphate
  modified_base 16: mod_base = OTHER; note = 2'-O-methylcytidine-3'-phosphate
  modified_base 17: mod_base = OTHER; note = 2'-O-methyluridine-3'-phosphate
  modified_base 18: mod_base = OTHER; note = 2'-O-methylguanosine-3'-phosphate
  modified_base 19: mod_base = OTHER; note = 2'-O-methylcytidine-3'-phosphate
  modified_base 20: mod_base = OTHER; note = 2'-O-methyluridine-3'-phosphate
  modified_base 21: mod_base = OTHER; note = 2'-O-methyladenosine
tgtgttattttctgactgcta

SEQ ID NO: 4277 - RNA, 21 nt, synthetic construct
  source 1..21: mol_type = other RNA
  modified_base 1: mod_base = OTHER; note = 2'-O-methylguanosine-3'-phosphate
  modified_base 2: mod_base = OTHER; note = 2'-O-methyluridine-3'-phosphate
  modified_base 3: mod_base = OTHER; note = 2'-O-methylguanosine-3'-phosphate
  modified_base 4: mod_base = OTHER; note = 2'-O-methyluridine-3'-phosphate
  modified_base 5: mod_base = OTHER; note = 2'-O-methyluridine-3'-phosphate
  modified_base 6: mod_base = OTHER; note = 2'-O-methyladenosine-3'-phosphate
  modified_base 7: mod_base = OTHER; note = 2'-deoxy-2'-fluorouridine-3'-phosphate
  modified_base 8: mod_base = OTHER; note = 2'-O-methyluridine-3'-phosphate
  modified_base 9: mod_base = OTHER; note = 2'-deoxy-2'-fluorouridine-3'-phosphate
  modified_base 10: mod_base = OTHER; note = 2'-deoxy-2'-fluorouridine-3'-phosphate
  modified_base 11: mod_base = OTHER; note = 2'-deoxy-2'-fluorocytidine-3'-phosphate
  modified_base 12: mod_base = OTHER; note = 2'-O-methyluridine-3'-phosphate
  modified_base 13: mod_base = OTHER; note = 2'-O-methylguanosine-3'-phosphate
  modified_base 14: mod_base = OTHER; note = 2'-O-methyladenosine-3'-phosphate
  modified_base 15: mod_base = OTHER; note = 2'-O-methylcytidine-3'-phosphate
  modified_base 16: mod_base = OTHER; note = 2'-O-methyluridine-3'-phosphate
  modified_base 17: mod_base = OTHER; note = 2'-O-methylguanosine-3'-phosphate
  modified_base 18: mod_base = OTHER; note = 2'-O-methylcytidine-3'-phosphate
  modified_base 19: mod_base = OTHER; note = 2'-O-methyluridine-3'-phosphate
  modified_base 20: mod_base = OTHER; note = 2'-O-methylguanosine-3'-phosphate
  modified_base 21: mod_base = OTHER; note = 2'-O-methyladenosine
gtgttattttctgactgctga

SEQ ID NO: 4278 - RNA, 21 nt, synthetic construct
  source 1..21: mol_type = other RNA
  modified_base 1: mod_base = OTHER; note = 2'-O-methyluridine-3'-phosphate
  modified_base 2: mod_base = OTHER; note = 2'-O-methylguanosine-3'-phosphate
  modified_base 3: mod_base = OTHER; note = 2'-O-methyluridine-3'-phosphate
  modified_base 4: mod_base = OTHER; note = 2'-O-methyluridine-3'-phosphate
  modified_base 5: mod_base = OTHER; note = 2'-O-methyladenosine-3'-phosphate
  modified_base 6: mod_base = OTHER; note = 2'-O-methyluridine-3'-phosphate
  modified_base 7: mod_base = OTHER; note = 2'-deoxy-2'-fluorouridine-3'-phosphate
  modified_base 8: mod_base = OTHER; note = 2'-O-methyluridine-3'-phosphate
  modified_base 9: mod_base = OTHER; note = 2'-deoxy-2'-fluorouridine-3'-phosphate
  modified_base 10: mod_base = OTHER; note = 2'-deoxy-2'-fluorocytidine-3'-phosphate
  modified_base 11: mod_base = OTHER; note = 2'-deoxy-2'-fluorouridine-3'-phosphate
  modified_base 12: mod_base = OTHER; note = 2'-O-methylguanosine-3'-phosphate
  modified_base 13: mod_base = OTHER; note = 2'-O-methyladenosine-3'-phosphate
  modified_base 14: mod_base = OTHER; note = 2'-O-methylcytidine-3'-phosphate
  modified_base 15: mod_base = OTHER; note = 2'-O-methyluridine-3'-phosphate
  modified_base 16: mod_base = OTHER; note = 2'-O-methylguanosine-3'-phosphate
  modified_base 17: mod_base = OTHER; note = 2'-O-methylcytidine-3'-phosphate
  modified_base 18: mod_base = OTHER; note = 2'-O-methyluridine-3'-phosphate
  modified_base 19: mod_base = OTHER; note = 2'-O-methylguanosine-3'-phosphate
  modified_base 20: mod_base = OTHER; note = 2'-O-methylguanosine-3'-phosphate
  modified_base 21: mod_base = OTHER; note = 2'-O-methyladenosine
tgttattttctgactgctgga

SEQ ID NO: 4279 - RNA, 21 nt, synthetic construct
  source 1..21: mol_type = other RNA
  modified_base 1: mod_base = OTHER; note = 2'-O-methylguanosine-3'-phosphate
  modified_base 2: mod_base = OTHER; note = 2'-O-methyluridine-3'-phosphate
  modified_base 3: mod_base = OTHER; note = 2'-O-methyluridine-3'-phosphate
  modified_base 4: mod_base = OTHER; note = 2'-O-methyladenosine-3'-phosphate
  modified_base 5: mod_base = OTHER; note = 2'-O-methyluridine-3'-phosphate
  modified_base 6: mod_base = OTHER; note = 2'-O-methyluridine-3'-phosphate
  modified_base 7: mod_base = OTHER; note = 2'-deoxy-2'-fluorouridine-3'-phosphate
  modified_base 8: mod_base = OTHER; note = 2'-O-methyluridine-3'-phosphate
  modified_base 9: mod_base = OTHER; note = 2'-deoxy-2'-fluorocytidine-3'-phosphate
  modified_base 10: mod_base = OTHER; note = 2'-deoxy-2'-fluorouridine-3'-phosphate
  modified_base 11: mod_base = OTHER; note = 2'-deoxy-2'-fluoroguanosine-3'-phosphate
  modified_base 12: mod_base = OTHER; note = 2'-O-methyladenosine-3'-phosphate
  modified_base 13: mod_base = OTHER; note = 2'-O-methylcytidine-3'-phosphate
  modified_base 14: mod_base = OTHER; note = 2'-O-methyluridine-3'-phosphate
  modified_base 15: mod_base = OTHER; note = 2'-O-methylguanosine-3'-phosphate
  modified_base 16: mod_base = OTHER; note = 2'-O-methylcytidine-3'-phosphate
  modified_base 17: mod_base = OTHER; note = 2'-O-methyluridine-3'-phosphate
  modified_base 18: mod_base = OTHER; note = 2'-O-methylguanosine-3'-phosphate
  modified_base 19: mod_base = OTHER; note = 2'-O-methylguanosine-3'-phosphate
  modified_base 20: mod_base = OTHER; note = 2'-O-methyladenosine-3'-phosphate
  modified_base 21: mod_base = OTHER; note = 2'-O-methyladenosine
gttattttctgactgctggaa

SEQ ID NO: 4280 - RNA, 21 nt, synthetic construct
  source 1..21: mol_type = other RNA
  modified_base 1: mod_base = OTHER; note = 2'-O-methyluridine-3'-phosphate
  modified_base 2: mod_base = OTHER; note = 2'-O-methyluridine-3'-phosphate
  modified_base 3: mod_base = OTHER; note = 2'-O-methyladenosine-3'-phosphate
  modified_base 4: mod_base = OTHER; note = 2'-O-methyluridine-3'-phosphate
  modified_base 5: mod_base = OTHER; note = 2'-O-methyluridine-3'-phosphate
  modified_base 6: mod_base = OTHER; note = 2'-O-methyluridine-3'-phosphate
  modified_base 7: mod_base = OTHER; note = 2'-deoxy-2'-fluorouridine-3'-phosphate
  modified_base 8: mod_base = OTHER; note = 2'-O-methylcytidine-3'-phosphate
  modified_base 9: mod_base = OTHER; note = 2'-deoxy-2'-fluorouridine-3'-phosphate
  modified_base 10: mod_base = OTHER; note = 2'-deoxy-2'-fluoroguanosine-3'-phosphate
  modified_base 11: mod_base = OTHER; note = 2'-deoxy-2'-fluoroadenosine-3'-phosphate
  modified_base 12: mod_base = OTHER; note = 2'-O-methylcytidine-3'-phosphate
  modified_base 13: mod_base = OTHER; note = 2'-O-methyluridine-3'-phosphate
  modified_base 14: mod_base = OTHER; note = 2'-O-methylguanosine-3'-phosphate
  modified_base 15: mod_base = OTHER; note = 2'-O-methylcytidine-3'-phosphate
  modified_base 16: mod_base = OTHER; note = 2'-O-methyluridine-3'-phosphate
  modified_base 17: mod_base = OTHER; note = 2'-O-methylguanosine-3'-phosphate
  modified_base 18: mod_base = OTHER; note = 2'-O-methylguanosine-3'-phosphate
  modified_base 19: mod_base = OTHER; note = 2'-O-methyladenosine-3'-phosphate
  modified_base 20: mod_base = OTHER; note = 2'-O-methyluridine-3'-phosphate
  modified_base 21: mod_base = OTHER; note = 2'-O-methyladenosine
ttattttctgactgctggata

SEQ ID NO: 4281 - RNA, 21 nt, synthetic construct
  source 1..21: mol_type = other RNA
  modified_base 1: mod_base = OTHER; note = 2'-O-methyluridine-3'-phosphate
  modified_base 2: mod_base = OTHER; note = 2'-O-methyladenosine-3'-phosphate
  modified_base 3: mod_base = OTHER; note = 2'-O-methyluridine-3'-phosphate
  modified_base 4: mod_base = OTHER; note = 2'-O-methyluridine-3'-phosphate
  modified_base 5: mod_base = OTHER; note = 2'-O-methyluridine-3'-phosphate
  modified_base 6: mod_base = OTHER; note = 2'-O-methyluridine-3'-phosphate
  modified_base 7: mod_base = OTHER; note = 2'-deoxy-2'-fluorocytidine-3'-phosphate
  modified_base 8: mod_base = OTHER; note = 2'-O-methyluridine-3'-phosphate
  modified_base 9: mod_base = OTHER; note = 2'-deoxy-2'-fluoroguanosine-3'-phosphate
  modified_base 10: mod_base = OTHER; note = 2'-deoxy-2'-fluoroadenosine-3'-phosphate
  modified_base 11: mod_base = OTHER; note = 2'-deoxy-2'-fluorocytidine-3'-phosphate
  modified_base 12: mod_base = OTHER; note = 2'-O-methyluridine-3'-phosphate
  modified_base 13: mod_base = OTHER; note = 2'-O-methylguanosine-3'-phosphate
  modified_base 14: mod_base = OTHER; note = 2'-O-methylcytidine-3'-phosphate
  modified_base 15: mod_base = OTHER; note = 2'-O-methyluridine-3'-phosphate
  modified_base 16: mod_base = OTHER; note = 2'-O-methylguanosine-3'-phosphate
  modified_base 17: mod_base = OTHER; note = 2'-O-methylguanosine-3'-phosphate
  modified_base 18: mod_base = OTHER; note = 2'-O-methyladenosine-3'-phosphate
  modified_base 19: mod_base = OTHER; note = 2'-O-methyluridine-3'-phosphate
  modified_base 20: mod_base = OTHER; note = 2'-O-methyluridine-3'-phosphate
  modified_base 21: mod_base = OTHER; note = 2'-O-methyladenosine
tattttctgactgctggatta

SEQ ID NO: 4282 - RNA, 21 nt, synthetic construct
  source 1..21: mol_type = other RNA
  modified_base 1: mod_base = OTHER; note = 2'-O-methyladenosine-3'-phosphate
  modified_base 2: mod_base = OTHER; note = 2'-O-methyluridine-3'-phosphate
  modified_base 3: mod_base = OTHER; note = 2'-O-methyluridine-3'-phosphate
  modified_base 4: mod_base = OTHER; note = 2'-O-methyluridine-3'-phosphate
  modified_base 5: mod_base = OTHER; note = 2'-O-methyluridine-3'-phosphate
  modified_base 6: mod_base = OTHER; note = 2'-O-methylcytidine-3'-phosphate
  modified_base 7: mod_base = OTHER; note = 2'-deoxy-2'-fluorouridine-3'-phosphate
  modified_base 8: mod_base = OTHER; note = 2'-O-methylguanosine-3'-phosphate
  modified_base 9: mod_base = OTHER; note = 2'-deoxy-2'-fluoroadenosine-3'-phosphate
  modified_base 10: mod_base = OTHER; note = 2'-deoxy-2'-fluorocytidine-3'-phosphate
  modified_base 11: mod_base = OTHER; note = 2'-deoxy-2'-fluorouridine-3'-phosphate
  modified_base 12: mod_base = OTHER; note = 2'-O-methylguanosine-3'-phosphate
  modified_base 13: mod_base = OTHER; note = 2'-O-methylcytidine-3'-phosphate
  modified_base 14: mod_base = OTHER; note = 2'-O-methyluridine-3'-phosphate
  modified_base 15: mod_base = OTHER; note = 2'-O-methylguanosine-3'-phosphate
  modified_base 16: mod_base = OTHER; note = 2'-O-methylguanosine-3'-phosphate
  modified_base 17: mod_base = OTHER; note = 2'-O-methyladenosine-3'-phosphate
  modified_base 18: mod_base = OTHER; note = 2'-O-methyluridine-3'-phosphate
  modified_base 19: mod_base = OTHER; note = 2'-O-methyluridine-3'-phosphate
  modified_base 20: mod_base = OTHER; note = 2'-O-methylcytidine-3'-phosphate
  modified_base 21: mod_base = OTHER; note = 2'-O-methyladenosine
attttctgactgctggattca

SEQ ID NO: 4283 - RNA, 21 nt, synthetic construct
  source 1..21: mol_type = other RNA
  modified_base 1: mod_base = OTHER; note = 2'-O-methyluridine-3'-phosphate
  modified_base 2: mod_base = OTHER; note = 2'-O-methylcytidine-3'-phosphate
  modified_base 3: mod_base = OTHER; note = 2'-O-methyluridine-3'-phosphate
  modified_base 4: mod_base = OTHER; note = 2'-O-methylguanosine-3'-phosphate
  modified_base 5: mod_base = OTHER; note = 2'-O-methyladenosine-3'-phosphate
  modified_base 6: mod_base = OTHER; note = 2'-O-methylcytidine-3'-phosphate
  modified_base 7: mod_base = OTHER; note = 2'-deoxy-2'-fluorouridine-3'-phosphate
  modified_base 8: mod_base = OTHER; note = 2'-O-methylguanosine-3'-phosphate
  modified_base 9: mod_base = OTHER; note = 2'-deoxy-2'-fluorocytidine-3'-phosphate
  modified_base 10: mod_base = OTHER; note = 2'-deoxy-2'-fluorouridine-3'-phosphate
  modified_base 11: mod_base = OTHER; note = 2'-deoxy-2'-fluoroguanosine-3'-phosphate
  modified_base 12: mod_base = OTHER; note = 2'-O-methylguanosine-3'-phosphate
  modified_base 13: mod_base = OTHER; note = 2'-O-methyladenosine-3'-phosphate
  modified_base 14: mod_base = OTHER; note = 2'-O-methyluridine-3'-phosphate
  modified_base 15: mod_base = OTHER; note = 2'-O-methyluridine-3'-phosphate
  modified_base 16: mod_base = OTHER; note = 2'-O-methylcytidine-3'-phosphate
  modified_base 17: mod_base = OTHER; note = 2'-O-methyluridine-3'-phosphate
  modified_base 18: mod_base = OTHER; note = 2'-O-methylguanosine-3'-phosphate
  modified_base 19: mod_base = OTHER; note = 2'-O-methyluridine-3'-phosphate
  modified_base 20: mod_base = OTHER; note = 2'-O-methyladenosine-3'-phosphate
  modified_base 21: mod_base = OTHER; note = 2'-O-methyladenosine
tctgactgctggattctgtaa

SEQ ID NO: 4284 - RNA, 21 nt, synthetic construct
  source 1..21: mol_type = other RNA
  modified_base 1: mod_base = OTHER; note = 2'-O-methyladenosine-3'-phosphate
  modified_base 2: mod_base = OTHER; note = 2'-O-methylguanosine-3'-phosphate
  modified_base 3: mod_base = OTHER; note = 2'-O-methyluridine-3'-phosphate
  modified_base 4: mod_base = OTHER; note = 2'-O-methyladenosine-3'-phosphate
  modified_base 5: mod_base = OTHER; note = 2'-O-methyladenosine-3'-phosphate
  modified_base 6: mod_base = OTHER; note = 2'-O-methylguanosine-3'-phosphate
  modified_base 7: mod_base = OTHER; note = 2'-deoxy-2'-fluoroguanosine-3'-phosphate
  modified_base 8: mod_base = OTHER; note = 2'-O-methyluridine-3'-phosphate
  modified_base 9: mod_base = OTHER; note = 2'-deoxy-2'-fluoroguanosine-3'-phosphate
  modified_base 10: mod_base = OTHER; note = 2'-deoxy-2'-fluoroadenosine-3'-phosphate
  modified_base 11: mod_base = OTHER; note = 2'-deoxy-2'-fluorocytidine-3'-phosphate
  modified_base 12: mod_base = OTHER; note = 2'-O-methyladenosine-3'-phosphate
  modified_base 13: mod_base = OTHER; note = 2'-O-methyluridine-3'-phosphate
  modified_base 14: mod_base = OTHER; note = 2'-O-methyladenosine-3'-phosphate
  modified_base 15: mod_base = OTHER; note = 2'-O-methylguanosine-3'-phosphate
  modified_base 16: mod_base = OTHER; note = 2'-O-methylcytidine-3'-phosphate
  modified_base 17: mod_base = OTHER; note = 2'-O-methyluridine-3'-phosphate
  modified_base 18: mod_base = OTHER; note = 2'-O-methyladenosine-3'-phosphate
  modified_base 19: mod_base = OTHER; note = 2'-O-methyluridine-3'-phosphate
  modified_base 20: mod_base = OTHER; note = 2'-O-methylguanosine-3'-phosphate
  modified_base 21: mod_base = OTHER; note = 2'-O-methyladenosine
agtaaggtgacatagctatga

SEQ ID NO: 4285 - RNA, 21 nt, synthetic construct
  source 1..21: mol_type = other RNA
  modified_base 1: mod_base = OTHER; note = 2'-O-methylguanosine-3'-phosphate
  modified_base 2: mod_base = OTHER; note = 2'-O-methyluridine-3'-phosphate
  modified_base 3: mod_base = OTHER; note = 2'-O-methyladenosine-3'-phosphate
  modified_base 4: mod_base = OTHER; note = 2'-O-methyladenosine-3'-phosphate
  modified_base 5: mod_base = OTHER; note = 2'-O-methylguanosine-3'-phosphate
  modified_base 6: mod_base = OTHER; note = 2'-O-methylguanosine-3'-phosphate
  modified_base 7: mod_base = OTHER; note = 2'-deoxy-2'-fluorouridine-3'-phosphate
  modified_base 8: mod_base = OTHER; note = 2'-O-methylguanosine-3'-phosphate
  modified_base 9: mod_base = OTHER; note = 2'-deoxy-2'-fluoroadenosine-3'-phosphate
  modified_base 10: mod_base = OTHER; note = 2'-deoxy-2'-fluorocytidine-3'-phosphate
  modified_base 11: mod_base = OTHER; note = 2'-deoxy-2'-fluoroadenosine-3'-phosphate
  modified_base 12: mod_base = OTHER; note = 2'-O-methyluridine-3'-phosphate
  modified_base 13: mod_base = OTHER; note = 2'-O-methyladenosine-3'-phosphate
  modified_base 14: mod_base = OTHER; note = 2'-O-methylguanosine-3'-phosphate
  modified_base 15: mod_base = OTHER; note = 2'-O-methylcytidine-3'-phosphate
  modified_base 16: mod_base = OTHER; note = 2'-O-methyluridine-3'-phosphate
  modified_base 17: mod_base = OTHER; note = 2'-O-methyladenosine-3'-phosphate
  modified_base 18: mod_base = OTHER; note = 2'-O-methyluridine-3'-phosphate
  modified_base 19: mod_base = OTHER; note = 2'-O-methylguanosine-3'-phosphate
  modified_base 20: mod_base = OTHER; note = 2'-O-methyladenosine-3'-phosphate
  modified_base 21: mod_base = OTHER; note = 2'-O-methyladenosine
gtaaggtgacatagctatgaa

SEQ ID NO: 4286 - RNA, 21 nt, synthetic construct
  source 1..21: mol_type = other RNA
  modified_base 1: mod_base = OTHER; note = 2'-O-methyluridine-3'-phosphate
  modified_base 2: mod_base = OTHER; note = 2'-O-methyladenosine-3'-phosphate
  modified_base 3: mod_base = OTHER; note = 2'-O-methyladenosine-3'-phosphate
  modified_base 4: mod_base = OTHER; note = 2'-O-methylguanosine-3'-phosphate
  modified_base 5: mod_base = OTHER; note = 2'-O-methylguanosine-3'-phosphate
  modified_base 6: mod_base = OTHER; note = 2'-O-methyluridine-3'-phosphate
  modified_base 7: mod_base = OTHER; note = 2'-deoxy-2'-fluoroguanosine-3'-phosphate
  modified_base 8: mod_base = OTHER; note = 2'-O-methyladenosine-3'-phosphate
  modified_base 9: mod_base = OTHER; note = 2'-deoxy-2'-fluorocytidine-3'-phosphate
  modified_base 10: mod_base = OTHER; note = 2'-deoxy-2'-fluoroadenosine-3'-phosphate
  modified_base 11: mod_base = OTHER; note = 2'-deoxy-2'-fluorouridine-3'-phosphate
  modified_base 12: mod_base = OTHER; note = 2'-O-methyladenosine-3'-phosphate
  modified_base 13: mod_base = OTHER; note = 2'-O-methylguanosine-3'-phosphate
  modified_base 14: mod_base = OTHER; note = 2'-O-methylcytidine-3'-phosphate
  modified_base 15: mod_base = OTHER; note = 2'-O-methyluridine-3'-phosphate
  modified_base 16: mod_base = OTHER; note = 2'-O-methyladenosine-3'-phosphate
  modified_base 17: mod_base = OTHER; note = 2'-O-methyluridine-3'-phosphate
  modified_base 18: mod_base = OTHER; note = 2'-O-methylguanosine-3'-phosphate
  modified_base 19: mod_base = OTHER; note = 2'-O-methyladenosine-3'-phosphate
  modified_base 20: mod_base = OTHER; note = 2'-O-methylcytidine-3'-phosphate
  modified_base 21: mod_base = OTHER; note = 2'-O-methyladenosine
taaggtgacatagctatgaca

SEQ ID NO: 4287 - RNA, 21 nt, synthetic construct
  source 1..21: mol_type = other RNA
  modified_base 1: mod_base = OTHER; note = 2'-O-methyladenosine-3'-phosphate
  modified_base 2: mod_base = OTHER; note = 2'-O-methyladenosine-3'-phosphate
  modified_base 3: mod_base = OTHER; note = 2'-O-methylguanosine-3'-phosphate
  modified_base 4: mod_base = OTHER; note = 2'-O-methylguanosine-3'-phosphate
  modified_base 5: mod_base = OTHER; note = 2'-O-methyluridine-3'-phosphate
  modified_base 6: mod_base = OTHER; note = 2'-O-methylguanosine-3'-phosphate
  modified_base 7: mod_base = OTHER; note = 2'-deoxy-2'-fluoroadenosine-3'-phosphate
  modified_base 8: mod_base = OTHER; note = 2'-O-methylcytidine-3'-phosphate
  modified_base 9: mod_base = OTHER; note = 2'-deoxy-2'-fluoroadenosine-3'-phosphate
  modified_base 10: mod_base = OTHER; note = 2'-deoxy-2'-fluorouridine-3'-phosphate
  modified_base 11: mod_base = OTHER; note = 2'-deoxy-2'-fluoroadenosine-3'-phosphate
  modified_base 12: mod_base = OTHER; note = 2'-O-methylguanosine-3'-phosphate
  modified_base 13: mod_base = OTHER; note = 2'-O-methylcytidine-3'-phosphate
  modified_base 14: mod_base = OTHER; note = 2'-O-methyluridine-3'-phosphate
  modified_base 15: mod_base = OTHER; note = 2'-O-methyladenosine-3'-phosphate
  modified_base 16: mod_base = OTHER; note = 2'-O-methyluridine-3'-phosphate
  modified_base 17: mod_base = OTHER; note = 2'-O-methylguanosine-3'-phosphate
  modified_base 18: mod_base = OTHER; note = 2'-O-methyladenosine-3'-phosphate
  modified_base 19: mod_base = OTHER; note = 2'-O-methylcytidine-3'-phosphate
  modified_base 20: mod_base = OTHER; note = 2'-O-methyladenosine-3'-phosphate
  modified_base 21: mod_base = OTHER; note = 2'-O-methyladenosine
aaggtgacatagctatgacaa

SEQ ID NO: 4288 - RNA, 21 nt, synthetic construct
  source 1..21: mol_type = other RNA
  modified_base 1: mod_base = OTHER; note = 2'-O-methyladenosine-3'-phosphate
  modified_base 2: mod_base = OTHER; note = 2'-O-methylguanosine-3'-phosphate
  modified_base 3: mod_base = OTHER; note = 2'-O-methylguanosine-3'-phosphate
  modified_base 4: mod_base = OTHER; note = 2'-O-methyluridine-3'-phosphate
  modified_base 5: mod_base = OTHER; note = 2'-O-methylguanosine-3'-phosphate
  modified_base 6: mod_base = OTHER; note = 2'-O-methyladenosine-3'-phosphate
  modified_base 7: mod_base = OTHER; note = 2'-deoxy-2'-fluorocytidine-3'-phosphate
  modified_base 8: mod_base = OTHER; note = 2'-O-methyladenosine-3'-phosphate
  modified_base 9: mod_base = OTHER; note = 2'-deoxy-2'-fluorouridine-3'-phosphate
  modified_base 10: mod_base = OTHER; note = 2'-deoxy-2'-fluoroadenosine-3'-phosphate
  modified_base 11: mod_base = OTHER; note = 2'-deoxy-2'-fluoroguanosine-3'-phosphate
  modified_base 12: mod_base = OTHER; note = 2'-O-methylcytidine-3'-phosphate
  modified_base 13: mod_base = OTHER; note = 2'-O-methyluridine-3'-phosphate
  modified_base 14: mod_base = OTHER; note = 2'-O-methyladenosine-3'-phosphate
  modified_base 15: mod_base = OTHER; note = 2'-O-methyluridine-3'-phosphate
  modified_base 16: mod_base = OTHER; note = 2'-O-methylguanosine-3'-phosphate
  modified_base 17: mod_base = OTHER; note = 2'-O-methyladenosine-3'-phosphate
  modified_base 18: mod_base = OTHER; note = 2'-O-methylcytidine-3'-phosphate
  modified_base 19: mod_base = OTHER; note = 2'-O-methyladenosine-3'-phosphate
  modified_base 20: mod_base = OTHER; note = 2'-O-methyluridine-3'-phosphate
  modified_base 21: mod_base = OTHER; note = 2'-O-methyladenosine
aggtgacatagctatgacata

SEQ ID NO: 4289 - RNA, 21 nt, synthetic construct
  source 1..21: mol_type = other RNA
  modified_base 1: mod_base = OTHER; note = 2'-O-methylguanosine-3'-phosphate
  modified_base 2: mod_base = OTHER; note = 2'-O-methylguanosine-3'-phosphate
  modified_base 3: mod_base = OTHER; note = 2'-O-methyluridine-3'-phosphate
  modified_base 4: mod_base = OTHER; note = 2'-O-methylguanosine-3'-phosphate
  modified_base 5: mod_base = OTHER; note = 2'-O-methyladenosine-3'-phosphate
  modified_base 6: mod_base = OTHER; note = 2'-O-methylcytidine-3'-phosphate
  modified_base 7: mod_base = OTHER; note = 2'-deoxy-2'-fluoroadenosine-3'-phosphate
  modified_base 8: mod_base = OTHER; note = 2'-O-methyluridine-3'-phosphate
  modified_base 9: mod_base = OTHER; note = 2'-deoxy-2'-fluoroadenosine-3'-phosphate
  modified_base 10: mod_base = OTHER; note = 2'-deoxy-2'-fluoroguanosine-3'-phosphate
  modified_base 11: mod_base = OTHER; note = 2'-deoxy-2'-fluorocytidine-3'-phosphate
  modified_base 12: mod_base = OTHER; note = 2'-O-methyluridine-3'-phosphate
  modified_base 13: mod_base = OTHER; note = 2'-O-methyladenosine-3'-phosphate
  modified_base 14: mod_base = OTHER; note = 2'-O-methyluridine-3'-phosphate
  modified_base 15: mod_base = OTHER; note = 2'-O-methylguanosine-3'-phosphate
  modified_base 16: mod_base = OTHER; note = 2'-O-methyladenosine-3'-phosphate
  modified_base 17: mod_base = OTHER; note = 2'-O-methylcytidine-3'-phosphate
  modified_base 18: mod_base = OTHER; note = 2'-O-methyladenosine-3'-phosphate
  modified_base 19: mod_base = OTHER; note = 2'-O-methyluridine-3'-phosphate
  modified_base 20: mod_base = OTHER; note = 2'-O-methyluridine-3'-phosphate
  modified_base 21: mod_base = OTHER; note = 2'-O-methyladenosine
ggtgacatagctatgacatta

SEQ ID NO: 4290 - RNA, 21 nt, synthetic construct
  source 1..21: mol_type = other RNA
  modified_base 1: mod_base = OTHER; note = 2'-O-methylguanosine-3'-phosphate
  modified_base 2: mod_base = OTHER; note = 2'-O-methyluridine-3'-phosphate
  modified_base 3: mod_base = OTHER; note = 2'-O-methylguanosine-3'-phosphate
  modified_base 4: mod_base = OTHER; note = 2'-O-methyladenosine-3'-phosphate
  modified_base 5: mod_base = OTHER; note = 2'-O-methylcytidine-3'-phosphate
  modified_base 6: mod_base = OTHER; note = 2'-O-methyladenosine-3'-phosphate
  modified_base 7: mod_base = OTHER; note = 2'-deoxy-2'-fluorouridine-3'-phosphate
  modified_base 8: mod_base = OTHER; note = 2'-O-methyladenosine-3'-phosphate
  modified_base 9: mod_base = OTHER; note = 2'-deoxy-2'-fluoroguanosine-3'-phosphate
  modified_base 10: mod_base = OTHER; note = 2'-deoxy-2'-fluorocytidine-3'-phosphate
  modified_base 11: mod_base = OTHER; note = 2'-deoxy-2'-fluorouridine-3'-phosphate
  modified_base 12: mod_base = OTHER; note = 2'-O-methyladenosine-3'-phosphate
  modified_base 13: mod_base = OTHER; note = 2'-O-methyluridine-3'-phosphate
  modified_base 14: mod_base = OTHER; note = 2'-O-methylguanosine-3'-phosphate
  modified_base 15: mod_base = OTHER; note = 2'-O-methyladenosine-3'-phosphate
  modified_base 16: mod_base = OTHER; note = 2'-O-methylcytidine-3'-phosphate
  modified_base 17: mod_base = OTHER; note = 2'-O-methyladenosine-3'-phosphate
  modified_base 18: mod_base = OTHER; note = 2'-O-methyluridine-3'-phosphate
  modified_base 19: mod_base = OTHER; note = 2'-O-methyluridine-3'-phosphate
  modified_base 20: mod_base = OTHER; note = 2'-O-methyluridine-3'-phosphate
  modified_base 21: mod_base = OTHER; note = 2'-O-methyladenosine
gtgacatagctatgacattta

SEQ ID NO: 4291 - RNA, 21 nt, synthetic construct
  source 1..21: mol_type = other RNA
  modified_base 1: mod_base = OTHER; note = 2'-O-methyluridine-3'-phosphate
  modified_base 2: mod_base = OTHER; note = 2'-O-methylguanosine-3'-phosphate
  modified_base 3: mod_base = OTHER; note = 2'-O-methyladenosine-3'-phosphate
  modified_base 4: mod_base = OTHER; note = 2'-O-methylcytidine-3'-phosphate
  modified_base 5: mod_base = OTHER; note = 2'-O-methyladenosine-3'-phosphate
  modified_base 6: mod_base = OTHER; note = 2'-O-methyluridine-3'-phosphate
  modified_base 7: mod_base = OTHER; note = 2'-deoxy-2'-fluoroadenosine-3'-phosphate
  modified_base 8: mod_base = OTHER; note = 2'-O-methylguanosine-3'-phosphate
  modified_base 9: mod_base = OTHER; note = 2'-deoxy-2'-fluorocytidine-3'-phosphate
  modified_base 10: mod_base = OTHER; note = 2'-deoxy-2'-fluorouridine-3'-phosphate
  modified_base 11: mod_base = OTHER; note = 2'-deoxy-2'-fluoroadenosine-3'-phosphate
  modified_base 12: mod_base = OTHER; note = 2'-O-methyluridine-3'-phosphate
  modified_base 13: mod_base = OTHER; note = 2'-O-methylguanosine-3'-phosphate
  modified_base 14: mod_base = OTHER; note = 2'-O-methyladenosine-3'-phosphate
  modified_base 15: mod_base = OTHER; note = 2'-O-methylcytidine-3'-phosphate
  modified_base 16: mod_base = OTHER; note = 2'-O-methyladenosine-3'-phosphate
  modified_base 17: mod_base = OTHER; note = 2'-O-methyluridine-3'-phosphate
  modified_base 18: mod_base = OTHER; note = 2'-O-methyluridine-3'-phosphate
  modified_base 19: mod_base = OTHER; note = 2'-O-methyluridine-3'-phosphate
  modified_base 20: mod_base = OTHER; note = 2'-O-methylguanosine-3'-phosphate
  modified_base 21: mod_base = OTHER; note = 2'-O-methyladenosine
tgacatagctatgacatttga

SEQ ID NO: 4292 - RNA, 21 nt, synthetic construct
  source 1..21: mol_type = other RNA
  modified_base 1: mod_base = OTHER; note = 2'-O-methyladenosine-3'-phosphate
  modified_base 2: mod_base = OTHER; note = 2'-O-methylcytidine-3'-phosphate
  modified_base 3: mod_base = OTHER; note = 2'-O-methyladenosine-3'-phosphate
  modified_base 4: mod_base = OTHER; note = 2'-O-methyluridine-3'-phosphate
  modified_base 5: mod_base = OTHER; note = 2'-O-methyladenosine-3'-phosphate
  modified_base 6: mod_base = OTHER; note = 2'-O-methylguanosine-3'-phosphate
  modified_base 7: mod_base = OTHER; note = 2'-deoxy-2'-fluorocytidine-3'-phosphate
  modified_base 8: mod_base = OTHER; note = 2'-O-methyluridine-3'-phosphate
  modified_base 9: mod_base = OTHER; note = 2'-deoxy-2'-fluoroadenosine-3'-phosphate
  modified_base 10: mod_base = OTHER; note = 2'-deoxy-2'-fluorouridine-3'-phosphate
  modified_base 11: mod_base = OTHER; note = 2'-deoxy-2'-fluoroguanosine-3'-phosphate
  modified_base 12: mod_base = OTHER; note = 2'-O-methyladenosine-3'-phosphate
  modified_base 13: mod_base = OTHER; note = 2'-O-methylcytidine-3'-phosphate
  modified_base 14: mod_base = OTHER; note = 2'-O-methyladenosine-3'-phosphate
  modified_base 15: mod_base = OTHER; note = 2'-O-methyluridine-3'-phosphate
  modified_base 16: mod_base = OTHER; note = 2'-O-methyluridine-3'-phosphate
  modified_base 17: mod_base = OTHER; note = 2'-O-methyluridine-3'-phosphate
  modified_base 18: mod_base = OTHER; note = 2'-O-methylguanosine-3'-phosphate
  modified_base 19: mod_base = OTHER; note = 2'-O-methyluridine-3'-phosphate
  modified_base 20: mod_base = OTHER; note = 2'-O-methyluridine-3'-phosphate
  modified_base 21: mod_base = OTHER; note = 2'-O-methyladenosine
acatagctatgacatttgtta

SEQ ID NO: 4293 - RNA, 21 nt, synthetic construct
  source 1..21: mol_type = other RNA
  modified_base 1: mod_base = OTHER; note = 2'-O-methylcytidine-3'-phosphate
  modified_base 2: mod_base = OTHER; note = 2'-O-methyladenosine-3'-phosphate
  modified_base 3: mod_base = OTHER; note = 2'-O-methyluridine-3'-phosphate
  modified_base 4: mod_base = OTHER; note = 2'-O-methyladenosine-3'-phosphate
  modified_base 5: mod_base = OTHER; note = 2'-O-methylguanosine-3'-phosphate
  modified_base 6: mod_base = OTHER; note = 2'-O-methylcytidine-3'-phosphate
  modified_base 7: mod_base = OTHER; note = 2'-deoxy-2'-fluorouridine-3'-phosphate
  modified_base 8: mod_base = OTHER; note = 2'-O-methyladenosine-3'-phosphate
  modified_base 9: mod_base = OTHER; note = 2'-deoxy-2'-fluorouridine-3'-phosphate
  modified_base 10: mod_base = OTHER; note = 2'-deoxy-2'-fluoroguanosine-3'-phosphate
  modified_base 11: mod_base = OTHER; note = 2'-deoxy-2'-fluoroadenosine-3'-phosphate
  modified_base 12: mod_base = OTHER; note = 2'-O-methylcytidine-3'-phosphate
  modified_base 13: mod_base = OTHER; note = 2'-O-methyladenosine-3'-phosphate
  modified_base 14: mod_base = OTHER; note = 2'-O-methyluridine-3'-phosphate
  modified_base 15: mod_base = OTHER; note = 2'-O-methyluridine-3'-phosphate
  modified_base 16: mod_base = OTHER; note = 2'-O-methyluridine-3'-phosphate
  modified_base 17: mod_base = OTHER; note = 2'-O-methylguanosine-3'-phosphate
  modified_base 18: mod_base = OTHER; note = 2'-O-methyluridine-3'-phosphate
  modified_base 19: mod_base = OTHER; note = 2'-O-methyluridine-3'-phosphate
  modified_base 20: mod_base = OTHER; note = 2'-O-methyladenosine-3'-phosphate
  modified_base 21: mod_base = OTHER; note = 2'-O-methyladenosine
catagctatgacatttgttaa

SEQ ID NO: 4294 - RNA, 21 nt, synthetic construct
  source 1..21: mol_type = other RNA
  modified_base 1: mod_base = OTHER; note = 2'-O-methyladenosine-3'-phosphate
  modified_base 2: mod_base = OTHER; note = 2'-O-methyluridine-3'-phosphate
  modified_base 3: mod_base = OTHER; note = 2'-O-methyladenosine-3'-phosphate
  modified_base 4: mod_base = OTHER; note = 2'-O-methylguanosine-3'-phosphate
  modified_base 5: mod_base = OTHER; note = 2'-O-methylcytidine-3'-phosphate
  modified_base 6: mod_base = OTHER; note = 2'-O-methyluridine-3'-phosphate
  modified_base 7: mod_base = OTHER; note = 2'-deoxy-2'-fluoroadenosine-3'-phosphate
  modified_base 8: mod_base = OTHER; note = 2'-O-methyluridine-3'-phosphate
  modified_base 9: mod_base = OTHER; note = 2'-deoxy-2'-fluoroguanosine-3'-phosphate
  modified_base 10: mod_base = OTHER; note = 2'-deoxy-2'-fluoroadenosine-3'-phosphate
  modified_base 11: mod_base = OTHER; note = 2'-deoxy-2'-fluorocytidine-3'-phosphate
  modified_base 12: mod_base = OTHER; note = 2'-O-methyladenosine-3'-phosphate
  modified_base 13: mod_base = OTHER; note = 2'-O-methyluridine-3'-phosphate
  modified_base 14: mod_base = OTHER; note = 2'-O-methyluridine-3'-phosphate
  modified_base 15: mod_base = OTHER; note = 2'-O-methyluridine-3'-phosphate
  modified_base 16: mod_base = OTHER; note = 2'-O-methylguanosine-3'-phosphate
  modified_base 17: mod_base = OTHER; note = 2'-O-methyluridine-3'-phosphate
  modified_base 18: mod_base = OTHER; note = 2'-O-methyluridine-3'-phosphate
  modified_base 19: mod_base = OTHER; note = 2'-O-methyladenosine-3'-phosphate
  modified_base 20: mod_base = OTHER; note = 2'-O-methyladenosine-3'-phosphate
  modified_base 21: mod_base = OTHER; note = 2'-O-methyladenosine
atagctatgacatttgttaaa

SEQ ID NO: 4295 - RNA, 21 nt, synthetic construct
  source 1..21: mol_type = other RNA
  modified_base 1: mod_base = OTHER; note = 2'-O-methyluridine-3'-phosphate
  modified_base 2: mod_base = OTHER; note = 2'-O-methyladenosine-3'-phosphate
  modified_base 3: mod_base = OTHER; note = 2'-O-methylguanosine-3'-phosphate
  modified_base 4: mod_base = OTHER; note = 2'-O-methylcytidine-3'-phosphate
  modified_base 5: mod_base = OTHER; note = 2'-O-methyluridine-3'-phosphate
  modified_base 6: mod_base = OTHER; note = 2'-O-methyladenosine-3'-phosphate
  modified_base 7: mod_base = OTHER; note = 2'-deoxy-2'-fluorouridine-3'-phosphate
  modified_base 8: mod_base = OTHER; note = 2'-O-methylguanosine-3'-phosphate
  modified_base 9: mod_base = OTHER; note = 2'-deoxy-2'-fluoroadenosine-3'-phosphate
  modified_base 10: mod_base = OTHER; note = 2'-deoxy-2'-fluorocytidine-3'-phosphate
  modified_base 11: mod_base = OTHER; note = 2'-deoxy-2'-fluoroadenosine-3'-phosphate
  modified_base 12: mod_base = OTHER; note = 2'-O-methyluridine-3'-phosphate
  modified_base 13: mod_base = OTHER; note = 2'-O-methyluridine-3'-phosphate
  modified_base 14: mod_base = OTHER; note = 2'-O-methyluridine-3'-phosphate
  modified_base 15: mod_base = OTHER; note = 2'-O-methylguanosine-3'-phosphate
  modified_base 16: mod_base = OTHER; note = 2'-O-methyluridine-3'-phosphate
  modified_base 17: mod_base = OTHER; note = 2'-O-methyluridine-3'-phosphate
  modified_base 18: mod_base = OTHER; note = 2'-O-methyladenosine-3'-phosphate
  modified_base 19: mod_base = OTHER; note = 2'-O-methyladenosine-3'-phosphate
  modified_base 20: mod_base = OTHER; note = 2'-O-methyladenosine-3'-phosphate
  modified_base 21: mod_base = OTHER; note = 2'-O-methyladenosine
tagctatgacatttgttaaaa

SEQ ID NO: 4296 - RNA, 21 nt, synthetic construct
  source 1..21: mol_type = other RNA
  modified_base 1: mod_base = OTHER; note = 2'-O-methyladenosine-3'-phosphate
  modified_base 2: mod_base = OTHER; note = 2'-O-methylguanosine-3'-phosphate
  modified_base 3: mod_base = OTHER; note = 2'-O-methylcytidine-3'-phosphate
  modified_base 4: mod_base = OTHER; note = 2'-O-methyluridine-3'-phosphate
  modified_base 5: mod_base = OTHER; note = 2'-O-methyladenosine-3'-phosphate
  modified_base 6: mod_base = OTHER; note = 2'-O-methyluridine-3'-phosphate
  modified_base 7: mod_base = OTHER; note = 2'-deoxy-2'-fluoroguanosine-3'-phosphate
  modified_base 8: mod_base = OTHER; note = 2'-O-methyladenosine-3'-phosphate
  modified_base 9: mod_base = OTHER; note = 2'-deoxy-2'-fluorocytidine-3'-phosphate
  modified_base 10: mod_base = OTHER; note = 2'-deoxy-2'-fluoroadenosine-3'-phosphate
  modified_base 11: mod_base = OTHER; note = 2'-deoxy-2'-fluorouridine-3'-phosphate
  modified_base 12: mod_base = OTHER; note = 2'-O-methyluridine-3'-phosphate
  modified_base 13: mod_base = OTHER; note = 2'-O-methyluridine-3'-phosphate
  modified_base 14: mod_base = OTHER; note = 2'-O-methylguanosine-3'-phosphate
  modified_base 15: mod_base = OTHER; note = 2'-O-methyluridine-3'-phosphate
  modified_base 16: mod_base = OTHER; note = 2'-O-methyluridine-3'-phosphate
  modified_base 17: mod_base = OTHER; note = 2'-O-methyladenosine-3'-phosphate
  modified_base 18: mod_base = OTHER; note = 2'-O-methyladenosine-3'-phosphate
  modified_base 19: mod_base = OTHER; note = 2'-O-methyladenosine-3'-phosphate
  modified_base 20: mod_base = OTHER; note = 2'-O-methyladenosine-3'-phosphate
  modified_base 21: mod_base = OTHER; note = 2'-O-methyladenosine
agctatgacatttgttaaaaa

SEQ ID NO: 4297 - RNA, 21 nt, synthetic construct
  source 1..21: mol_type = other RNA
  modified_base 1: mod_base = OTHER; note = 2'-O-methylguanosine-3'-phosphate
  modified_base 2: mod_base = OTHER; note = 2'-O-methylcytidine-3'-phosphate
  modified_base 3: mod_base = OTHER; note = 2'-O-methyluridine-3'-phosphate
  modified_base 4: mod_base = OTHER; note = 2'-O-methyladenosine-3'-phosphate
  modified_base 5: mod_base = OTHER; note = 2'-O-methyluridine-3'-phosphate
  modified_base 6: mod_base = OTHER; note = 2'-O-methylguanosine-3'-phosphate
  modified_base 7: mod_base = OTHER; note = 2'-deoxy-2'-fluoroadenosine-3'-phosphate
  modified_base 8: mod_base = OTHER; note = 2'-O-methylcytidine-3'-phosphate
  modified_base 9: mod_base = OTHER; note = 2'-deoxy-2'-fluoroadenosine-3'-phosphate
  modified_base 10: mod_base = OTHER; note = 2'-deoxy-2'-fluorouridine-3'-phosphate
  modified_base 11: mod_base = OTHER; note = 2'-deoxy-2'-fluorouridine-3'-phosphate
  modified_base 12: mod_base = OTHER; note = 2'-O-methyluridine-3'-phosphate
  modified_base 13: mod_base = OTHER; note = 2'-O-methylguanosine-3'-phosphate
  modified_base 14: mod_base = OTHER; note = 2'-O-methyluridine-3'-phosphate
  modified_base 15: mod_base = OTHER; note = 2'-O-methyluridine-3'-phosphate
  modified_base 16: mod_base = OTHER; note = 2'-O-methyladenosine-3'-phosphate
  modified_base 17: mod_base = OTHER; note = 2'-O-methyladenosine-3'-phosphate
  modified_base 18: mod_base = OTHER; note = 2'-O-methyladenosine-3'-phosphate
  modified_base 19: mod_base = OTHER; note = 2'-O-methyladenosine-3'-phosphate
  modified_base 20: mod_base = OTHER; note = 2'-O-methyladenosine-3'-phosphate
  modified_base 21: mod_base = OTHER; note = 2'-O-methyladenosine
gctatgacatttgttaaaaaa

SEQ ID NO: 4298 - RNA, 21 nt, synthetic construct
  source 1..21: mol_type = other RNA
  modified_base 1: mod_base = OTHER; note = 2'-O-methylcytidine-3'-phosphate
  modified_base 2: mod_base = OTHER; note = 2'-O-methyluridine-3'-phosphate
  modified_base 3: mod_base = OTHER; note = 2'-O-methyladenosine-3'-phosphate
  modified_base 4: mod_base = OTHER; note = 2'-O-methyluridine-3'-phosphate
  modified_base 5: mod_base = OTHER; note = 2'-O-methylguanosine-3'-phosphate
  modified_base 6: mod_base = OTHER; note = 2'-O-methyladenosine-3'-phosphate
  modified_base 7: mod_base = OTHER; note = 2'-deoxy-2'-fluorocytidine-3'-phosphate
  modified_base 8: mod_base = OTHER; note = 2'-O-methyladenosine-3'-phosphate
  modified_base 9: mod_base = OTHER; note = 2'-deoxy-2'-fluorouridine-3'-phosphate
  modified_base 10: mod_base = OTHER; note = 2'-deoxy-2'-fluorouridine-3'-phosphate
  modified_base 11: mod_base = OTHER; note = 2'-deoxy-2'-fluorouridine-3'-phosphate
  modified_base 12: mod_base = OTHER; note = 2'-O-methylguanosine-3'-phosphate
  modified_base 13: mod_base = OTHER; note = 2'-O-methyluridine-3'-phosphate
  modified_base 14: mod_base = OTHER; note = 2'-O-methyluridine-3'-phosphate
  modified_base 15: mod_base = OTHER; note = 2'-O-methyladenosine-3'-phosphate
  modified_base 16: mod_base = OTHER; note = 2'-O-methyladenosine-3'-phosphate
  modified_base 17: mod_base = OTHER; note = 2'-O-methyladenosine-3'-phosphate
  modified_base 18: mod_base = OTHER; note = 2'-O-methyladenosine-3'-phosphate
  modified_base 19: mod_base = OTHER; note = 2'-O-methyladenosine-3'-phosphate
  modified_base 20: mod_base = OTHER; note = 2'-O-methyluridine-3'-phosphate
  modified_base 21: mod_base = OTHER; note = 2'-O-methyladenosine
ctatgacatttgttaaaaata

SEQ ID NO: 4299 - RNA, 21 nt, synthetic construct
  source 1..21: mol_type = other RNA
  modified_base 1: mod_base = OTHER; note = 2'-O-methyluridine-3'-phosphate
  modified_base 2: mod_base = OTHER; note = 2'-O-methyladenosine-3'-phosphate
  modified_base 3: mod_base = OTHER; note = 2'-O-methyluridine-3'-phosphate
  modified_base 4: mod_base = OTHER; note = 2'-O-methylguanosine-3'-phosphate
  modified_base 5: mod_base = OTHER; note = 2'-O-methyladenosine-3'-phosphate
  modified_base 6: mod_base = OTHER; note = 2'-O-methylcytidine-3'-phosphate
  modified_base 7: mod_base = OTHER; note = 2'-deoxy-2'-fluoroadenosine-3'-phosphate
  modified_base 8: mod_base = OTHER; note = 2'-O-methyluridine-3'-phosphate
  modified_base 9: mod_base = OTHER; note = 2'-deoxy-2'-fluorouridine-3'-phosphate
  modified_base 10: mod_base = OTHER; note = 2'-deoxy-2'-fluorouridine-3'-phosphate
  modified_base 11: mod_base = OTHER; note = 2'-deoxy-2'-fluoroguanosine-3'-phosphate
  modified_base 12: mod_base = OTHER; note = 2'-O-methyluridine-3'-phosphate
  modified_base 13: mod_base = OTHER; note = 2'-O-methyluridine-3'-phosphate
  modified_base 14: mod_base = OTHER; note = 2'-O-methyladenosine-3'-phosphate
  modified_base 15: mod_base = OTHER; note = 2'-O-methyladenosine-3'-phosphate
  modified_base 16: mod_base = OTHER; note = 2'-O-methyladenosine-3'-phosphate
  modified_base 17: mod_base = OTHER; note = 2'-O-methyladenosine-3'-phosphate
  modified_base 18: mod_base = OTHER; note = 2'-O-methyladenosine-3'-phosphate
  modified_base 19: mod_base = OTHER; note = 2'-O-methyluridine-3'-phosphate
  modified_base 20: mod_base = OTHER; note = 2'-O-methyladenosine-3'-phosphate
  modified_base 21: mod_base = OTHER; note = 2'-O-methyladenosine
tatgacatttgttaaaaataa

SEQ ID NO: 4300 - RNA, 21 nt, synthetic construct
  source 1..21: mol_type = other RNA
  modified_base 1: mod_base = OTHER; note = 2'-O-methyladenosine-3'-phosphate
  modified_base 2: mod_base = OTHER; note = 2'-O-methyluridine-3'-phosphate
  modified_base 3: mod_base = OTHER; note = 2'-O-methylguanosine-3'-phosphate
  modified_base 4: mod_base = OTHER; note = 2'-O-methyladenosine-3'-phosphate
  modified_base 5: mod_base = OTHER; note = 2'-O-methylcytidine-3'-phosphate
  modified_base 6: mod_base = OTHER; note = 2'-O-methyladenosine-3'-phosphate
  modified_base 7: mod_base = OTHER; note = 2'-deoxy-2'-fluorouridine-3'-phosphate
  modified_base 8: mod_base = OTHER; note = 2'-O-methyluridine-3'-phosphate
  modified_base 9: mod_base = OTHER; note = 2'-deoxy-2'-fluorouridine-3'-phosphate
  modified_base 10: mod_base = OTHER; note = 2'-deoxy-2'-fluoroguanosine-3'-phosphate
  modified_base 11: mod_base = OTHER; note = 2'-deoxy-2'-fluorouridine-3'-phosphate
  modified_base 12: mod_base = OTHER; note = 2'-O-methyluridine-3'-phosphate
  modified_base 13: mod_base = OTHER; note = 2'-O-methyladenosine-3'-phosphate
  modified_base 14: mod_base = OTHER; note = 2'-O-methyladenosine-3'-phosphate
  modified_base 15: mod_base = OTHER; note = 2'-O-methyladenosine-3'-phosphate
  modified_base 16: mod_base = OTHER; note = 2'-O-methyladenosine-3'-phosphate
  modified_base 17: mod_base = OTHER; note = 2'-O-methyladenosine-3'-phosphate
  modified_base 18: mod_base = OTHER; note = 2'-O-methyluridine-3'-phosphate
  modified_base 19: mod_base = OTHER; note = 2'-O-methyladenosine-3'-phosphate
  modified_base 20: mod_base = OTHER; note = 2'-O-methyladenosine-3'-phosphate
  modified_base 21: mod_base = OTHER; note = 2'-O-methyladenosine
atgacatttgttaaaaataaa

SEQ ID NO: 4301 - RNA, 21 nt, synthetic construct
  source 1..21: mol_type = other RNA
  modified_base 1: mod_base = OTHER; note = 2'-O-methyluridine-3'-phosphate
  modified_base 2: mod_base = OTHER; note = 2'-O-methylguanosine-3'-phosphate
  modified_base 3: mod_base = OTHER; note = 2'-O-methyladenosine-3'-phosphate
  modified_base 4: mod_base = OTHER; note = 2'-O-methylcytidine-3'-phosphate
  modified_base 5: mod_base = OTHER; note = 2'-O-methyladenosine-3'-phosphate
  modified_base 6: mod_base = OTHER; note = 2'-O-methyluridine-3'-phosphate
  modified_base 7: mod_base = OTHER; note = 2'-deoxy-2'-fluorouridine-3'-phosphate
  modified_base 8: mod_base = OTHER; note = 2'-O-methyluridine-3'-phosphate
  modified_base 9: mod_base = OTHER; note = 2'-deoxy-2'-fluoroguanosine-3'-phosphate
  modified_base 10: mod_base = OTHER; note = 2'-deoxy-2'-fluorouridine-3'-phosphate
  modified_base 11: mod_base = OTHER; note = 2'-deoxy-2'-fluorouridine-3'-phosphate
  modified_base 12: mod_base = OTHER; note = 2'-O-methyladenosine-3'-phosphate
  modified_base 13: mod_base = OTHER; note = 2'-O-methyladenosine-3'-phosphate
  modified_base 14: mod_base = OTHER; note = 2'-O-methyladenosine-3'-phosphate
  modified_base 15: mod_base = OTHER; note = 2'-O-methyladenosine-3'-phosphate
  modified_base 16: mod_base = OTHER; note = 2'-O-methyladenosine-3'-phosphate
  modified_base 17: mod_base = OTHER; note = 2'-O-methyluridine-3'-phosphate
  modified_base 18: mod_base = OTHER; note = 2'-O-methyladenosine-3'-phosphate
  modified_base 19: mod_base = OTHER; note = 2'-O-methyladenosine-3'-phosphate
  modified_base 20: mod_base = OTHER; note = 2'-O-methyladenosine-3'-phosphate
  modified_base 21: mod_base = OTHER; note = 2'-O-methyladenosine
tgacatttgttaaaaataaaa

SEQ ID NO: 4302 - RNA, 21 nt, synthetic construct
  source 1..21: mol_type = other RNA
  modified_base 1: mod_base = OTHER; note = 2'-O-methylguanosine-3'-phosphate
  modified_base 2: mod_base = OTHER; note = 2'-O-methyladenosine-3'-phosphate
  modified_base 3: mod_base = OTHER; note = 2'-O-methylcytidine-3'-phosphate
  modified_base 4: mod_base = OTHER; note = 2'-O-methyladenosine-3'-phosphate
  modified_base 5: mod_base = OTHER; note = 2'-O-methyluridine-3'-phosphate
  modified_base 6: mod_base = OTHER; note = 2'-O-methyluridine-3'-phosphate
  modified_base 7: mod_base = OTHER; note = 2'-deoxy-2'-fluorouridine-3'-phosphate
  modified_base 8: mod_base = OTHER; note = 2'-O-methylguanosine-3'-phosphate
  modified_base 9: mod_base = OTHER; note = 2'-deoxy-2'-fluorouridine-3'-phosphate
  modified_base 10: mod_base = OTHER; note = 2'-deoxy-2'-fluorouridine-3'-phosphate
  modified_base 11: mod_base = OTHER; note = 2'-deoxy-2'-fluoroadenosine-3'-phosphate
  modified_base 12: mod_base = OTHER; note = 2'-O-methyladenosine-3'-phosphate
  modified_base 13: mod_base = OTHER; note = 2'-O-methyladenosine-3'-phosphate
  modified_base 14: mod_base = OTHER; note = 2'-O-methyladenosine-3'-phosphate
  modified_base 15: mod_base = OTHER; note = 2'-O-methyladenosine-3'-phosphate
  modified_base 16: mod_base = OTHER; note = 2'-O-methyluridine-3'-phosphate
  modified_base 17: mod_base = OTHER; note = 2'-O-methyladenosine-3'-phosphate
  modified_base 18: mod_base = OTHER; note = 2'-O-methyladenosine-3'-phosphate
  modified_base 19: mod_base = OTHER; note = 2'-O-methyladenosine-3'-phosphate
  modified_base 20: mod_base = OTHER; note = 2'-O-methylcytidine-3'-phosphate
  modified_base 21: mod_base = OTHER; note = 2'-O-methyladenosine
gacatttgttaaaaataaaca

SEQ ID NO: 4303 - RNA, 21 nt, synthetic construct
  source 1..21: mol_type = other RNA
  modified_base 1: mod_base = OTHER; note = 2'-O-methyladenosine-3'-phosphate
  modified_base 2: mod_base = OTHER; note = 2'-O-methylcytidine-3'-phosphate
  modified_base 3: mod_base = OTHER; note = 2'-O-methyladenosine-3'-phosphate
  modified_base 4: mod_base = OTHER; note = 2'-O-methyluridine-3'-phosphate
  modified_base 5: mod_base = OTHER; note = 2'-O-methyluridine-3'-phosphate
  modified_base 6: mod_base = OTHER; note = 2'-O-methyluridine-3'-phosphate
  modified_base 7: mod_base = OTHER; note = 2'-deoxy-2'-fluoroguanosine-3'-phosphate
  modified_base 8: mod_base = OTHER; note = 2'-O-methyluridine-3'-phosphate
  modified_base 9: mod_base = OTHER; note = 2'-deoxy-2'-fluorouridine-3'-phosphate
  modified_base 10: mod_base = OTHER; note = 2'-deoxy-2'-fluoroadenosine-3'-phosphate
  modified_base 11: mod_base = OTHER; note = 2'-deoxy-2'-fluoroadenosine-3'-phosphate
  modified_base 12: mod_base = OTHER; note = 2'-O-methyladenosine-3'-phosphate
  modified_base 13: mod_base = OTHER; note = 2'-O-methyladenosine-3'-phosphate
  modified_base 14: mod_base = OTHER; note = 2'-O-methyladenosine-3'-phosphate
  modified_base 15: mod_base = OTHER; note = 2'-O-methyluridine-3'-phosphate
  modified_base 16: mod_base = OTHER; note = 2'-O-methyladenosine-3'-phosphate
  modified_base 17: mod_base = OTHER; note = 2'-O-methyladenosine-3'-phosphate
  modified_base 18: mod_base = OTHER; note = 2'-O-methyladenosine-3'-phosphate
  modified_base 19: mod_base = OTHER; note = 2'-O-methylcytidine-3'-phosphate
  modified_base 20: mod_base = OTHER; note = 2'-O-methyluridine-3'-phosphate
  modified_base 21: mod_base = OTHER; note = 2'-O-methyladenosine
acatttgttaaaaataaacta

SEQ ID NO: 4304 - RNA, 21 nt, synthetic construct
  source 1..21: mol_type = other RNA
  modified_base 1: mod_base = OTHER; note = 2'-O-methyladenosine-3'-phosphate
  modified_base 2: mod_base = OTHER; note = 2'-O-methyladenosine-3'-phosphate
  modified_base 3: mod_base = OTHER; note = 2'-O-methyluridine-3'-phosphate
  modified_base 4: mod_base = OTHER; note = 2'-O-methyladenosine-3'-phosphate
  modified_base 5: mod_base = OTHER; note = 2'-O-methyladenosine-3'-phosphate
  modified_base 6: mod_base = OTHER; note = 2'-O-methyladenosine-3'-phosphate
  modified_base 7: mod_base = OTHER; note = 2'-deoxy-2'-fluorocytidine-3'-phosphate
  modified_base 8: mod_base = OTHER; note = 2'-O-methyluridine-3'-phosphate
  modified_base 9: mod_base = OTHER; note = 2'-deoxy-2'-fluorocytidine-3'-phosphate
  modified_base 10: mod_base = OTHER; note = 2'-deoxy-2'-fluorouridine-3'-phosphate
  modified_base 11: mod_base = OTHER; note = 2'-deoxy-2'-fluoroguanosine-3'-phosphate
  modified_base 12: mod_base = OTHER; note = 2'-O-methyluridine-3'-phosphate
  modified_base 13: mod_base = OTHER; note = 2'-O-methyladenosine-3'-phosphate
  modified_base 14: mod_base = OTHER; note = 2'-O-methylcytidine-3'-phosphate
  modified_base 15: mod_base = OTHER; note = 2'-O-methyluridine-3'-phosphate
  modified_base 16: mod_base = OTHER; note = 2'-O-methyluridine-3'-phosphate
  modified_base 17: mod_base = OTHER; note = 2'-O-methyladenosine-3'-phosphate
  modified_base 18: mod_base = OTHER; note = 2'-O-methyladenosine-3'-phosphate
  modified_base 19: mod_base = OTHER; note = 2'-O-methylcytidine-3'-phosphate
  modified_base 20: mod_base = OTHER; note = 2'-O-methyluridine-3'-phosphate
  modified_base 21: mod_base = OTHER; note = 2'-O-methyladenosine
aataaactctgtacttaacta

SEQ ID NO: 4305 - RNA, 21 nt, synthetic construct
  source 1..21: mol_type = other RNA
  modified_base 1: mod_base = OTHER; note = 2'-O-methyladenosine-3'-phosphate
  modified_base 2: mod_base = OTHER; note = 2'-O-methyluridine-3'-phosphate
  modified_base 3: mod_base = OTHER; note = 2'-O-methyladenosine-3'-phosphate
  modified_base 4: mod_base = OTHER; note = 2'-O-methyladenosine-3'-phosphate
  modified_base 5: mod_base = OTHER; note = 2'-O-methyladenosine-3'-phosphate
  modified_base 6: mod_base = OTHER; note = 2'-O-methylcytidine-3'-phosphate
  modified_base 7: mod_base = OTHER; note = 2'-deoxy-2'-fluorouridine-3'-phosphate
  modified_base 8: mod_base = OTHER; note = 2'-O-methylcytidine-3'-phosphate
  modified_base 9: mod_base = OTHER; note = 2'-deoxy-2'-fluorouridine-3'-phosphate
  modified_base 10: mod_base = OTHER; note = 2'-deoxy-2'-fluoroguanosine-3'-phosphate
  modified_base 11: mod_base = OTHER; note = 2'-deoxy-2'-fluorouridine-3'-phosphate
  modified_base 12: mod_base = OTHER; note = 2'-O-methyladenosine-3'-phosphate
  modified_base 13: mod_base = OTHER; note = 2'-O-methylcytidine-3'-phosphate
  modified_base 14: mod_base = OTHER; note = 2'-O-methyluridine-3'-phosphate
  modified_base 15: mod_base = OTHER; note = 2'-O-methyluridine-3'-phosphate
  modified_base 16: mod_base = OTHER; note = 2'-O-methyladenosine-3'-phosphate
  modified_base 17: mod_base = OTHER; note = 2'-O-methyladenosine-3'-phosphate
  modified_base 18: mod_base = OTHER; note = 2'-O-methylcytidine-3'-phosphate
  modified_base 19: mod_base = OTHER; note = 2'-O-methyluridine-3'-phosphate
  modified_base 20: mod_base = OTHER; note = 2'-O-methyluridine-3'-phosphate
  modified_base 21: mod_base = OTHER; note = 2'-O-methyladenosine
ataaactctgtacttaactta

SEQ ID NO: 4306 - RNA, 21 nt, synthetic construct
  source 1..21: mol_type = other RNA
  modified_base 1: mod_base = OTHER; note = 2'-O-methyluridine-3'-phosphate
  modified_base 2: mod_base = OTHER; note = 2'-O-methyladenosine-3'-phosphate
  modified_base 3: mod_base = OTHER; note = 2'-O-methyladenosine-3'-phosphate
  modified_base 4: mod_base = OTHER; note = 2'-O-methyladenosine-3'-phosphate
  modified_base 5: mod_base = OTHER; note = 2'-O-methylcytidine-3'-phosphate
  modified_base 6: mod_base = OTHER; note = 2'-O-methyluridine-3'-phosphate
  modified_base 7: mod_base = OTHER; note = 2'-deoxy-2'-fluorocytidine-3'-phosphate
  modified_base 8: mod_base = OTHER; note = 2'-O-methyluridine-3'-phosphate
  modified_base 9: mod_base = OTHER; note = 2'-deoxy-2'-fluoroguanosine-3'-phosphate
  modified_base 10: mod_base = OTHER; note = 2'-deoxy-2'-fluorouridine-3'-phosphate
  modified_base 11: mod_base = OTHER; note = 2'-deoxy-2'-fluoroadenosine-3'-phosphate
  modified_base 12: mod_base = OTHER; note = 2'-O-methylcytidine-3'-phosphate
  modified_base 13: mod_base = OTHER; note = 2'-O-methyluridine-3'-phosphate
  modified_base 14: mod_base = OTHER; note = 2'-O-methyluridine-3'-phosphate
  modified_base 15: mod_base = OTHER; note = 2'-O-methyladenosine-3'-phosphate
  modified_base 16: mod_base = OTHER; note = 2'-O-methyladenosine-3'-phosphate
  modified_base 17: mod_base = OTHER; note = 2'-O-methylcytidine-3'-phosphate
  modified_base 18: mod_base = OTHER; note = 2'-O-methyluridine-3'-phosphate
  modified_base 19: mod_base = OTHER; note = 2'-O-methyluridine-3'-phosphate
  modified_base 20: mod_base = OTHER; note = 2'-O-methyluridine-3'-phosphate
  modified_base 21: mod_base = OTHER; note = 2'-O-methyladenosine
taaactctgtacttaacttta

SEQ ID NO: 4307 - RNA, 21 nt, synthetic construct
  source 1..21: mol_type = other RNA
  modified_base 1: mod_base = OTHER; note = 2'-O-methyladenosine-3'-phosphate
  modified_base 2: mod_base = OTHER; note = 2'-O-methyladenosine-3'-phosphate
  modified_base 3: mod_base = OTHER; note = 2'-O-methyladenosine-3'-phosphate
  modified_base 4: mod_base = OTHER; note = 2'-O-methylcytidine-3'-phosphate
  modified_base 5: mod_base = OTHER; note = 2'-O-methyluridine-3'-phosphate
  modified_base 6: mod_base = OTHER; note = 2'-O-methylcytidine-3'-phosphate
  modified_base 7: mod_base = OTHER; note = 2'-deoxy-2'-fluorouridine-3'-phosphate
  modified_base 8: mod_base = OTHER; note = 2'-O-methylguanosine-3'-phosphate
  modified_base 9: mod_base = OTHER; note = 2'-deoxy-2'-fluorouridine-3'-phosphate
  modified_base 10: mod_base = OTHER; note = 2'-deoxy-2'-fluoroadenosine-3'-phosphate
  modified_base 11: mod_base = OTHER; note = 2'-deoxy-2'-fluorocytidine-3'-phosphate
  modified_base 12: mod_base = OTHER; note = 2'-O-methyluridine-3'-phosphate
  modified_base 13: mod_base = OTHER; note = 2'-O-methyluridine-3'-phosphate
  modified_base 14: mod_base = OTHER; note = 2'-O-methyladenosine-3'-phosphate
  modified_base 15: mod_base = OTHER; note = 2'-O-methyladenosine-3'-phosphate
  modified_base 16: mod_base = OTHER; note = 2'-O-methylcytidine-3'-phosphate
  modified_base 17: mod_base = OTHER; note = 2'-O-methyluridine-3'-phosphate
  modified_base 18: mod_base = OTHER; note = 2'-O-methyluridine-3'-phosphate
  modified_base 19: mod_base = OTHER; note = 2'-O-methyluridine-3'-phosphate
  modified_base 20: mod_base = OTHER; note = 2'-O-methylguanosine-3'-phosphate
  modified_base 21: mod_base = OTHER; note = 2'-O-methyladenosine
aaactctgtacttaactttga

SEQ ID NO: 4308 - RNA, 21 nt, synthetic construct
  source 1..21: mol_type = other RNA
  modified_base 1: mod_base = OTHER; note = 2'-O-methyladenosine-3'-phosphate
  modified_base 2: mod_base = OTHER; note = 2'-O-methyladenosine-3'-phosphate
  modified_base 3: mod_base = OTHER; note = 2'-O-methylcytidine-3'-phosphate
  modified_base 4: mod_base = OTHER; note = 2'-O-methyluridine-3'-phosphate
  modified_base 5: mod_base = OTHER; note = 2'-O-methylcytidine-3'-phosphate
  modified_base 6: mod_base = OTHER; note = 2'-O-methyluridine-3'-phosphate
  modified_base 7: mod_base = OTHER; note = 2'-deoxy-2'-fluoroguanosine-3'-phosphate
  modified_base 8: mod_base = OTHER; note = 2'-O-methyluridine-3'-phosphate
  modified_base 9: mod_base = OTHER; note = 2'-deoxy-2'-fluoroadenosine-3'-phosphate
  modified_base 10: mod_base = OTHER; note = 2'-deoxy-2'-fluorocytidine-3'-phosphate
  modified_base 11: mod_base = OTHER; note = 2'-deoxy-2'-fluorouridine-3'-phosphate
  modified_base 12: mod_base = OTHER; note = 2'-O-methyluridine-3'-phosphate
  modified_base 13: mod_base = OTHER; note = 2'-O-methyladenosine-3'-phosphate
  modified_base 14: mod_base = OTHER; note = 2'-O-methyladenosine-3'-phosphate
  modified_base 15: mod_base = OTHER; note = 2'-O-methylcytidine-3'-phosphate
  modified_base 16: mod_base = OTHER; note = 2'-O-methyluridine-3'-phosphate
  modified_base 17: mod_base = OTHER; note = 2'-O-methyluridine-3'-phosphate
  modified_base 18: mod_base = OTHER; note = 2'-O-methyluridine-3'-phosphate
  modified_base 19: mod_base = OTHER; note = 2'-O-methylguanosine-3'-phosphate
  modified_base 20: mod_base = OTHER; note = 2'-O-methyladenosine-3'-phosphate
  modified_base 21: mod_base = OTHER; note = 2'-O-methyladenosine
aactctgtacttaactttgaa

SEQ ID NO: 4309 - RNA, 21 nt, synthetic construct
  source 1..21: mol_type = other RNA
  modified_base 1: mod_base = OTHER; note = 2'-O-methyladenosine-3'-phosphate
  modified_base 2: mod_base = OTHER; note = 2'-O-methylcytidine-3'-phosphate
  modified_base 3: mod_base = OTHER; note = 2'-O-methyluridine-3'-phosphate
  modified_base 4: mod_base = OTHER; note = 2'-O-methylcytidine-3'-phosphate
  modified_base 5: mod_base = OTHER; note = 2'-O-methyluridine-3'-phosphate
  modified_base 6: mod_base = OTHER; note = 2'-O-methylguanosine-3'-phosphate
  modified_base 7: mod_base = OTHER; note = 2'-deoxy-2'-fluorouridine-3'-phosphate
  modified_base 8: mod_base = OTHER; note = 2'-O-methyladenosine-3'-phosphate
  modified_base 9: mod_base = OTHER; note = 2'-deoxy-2'-fluorocytidine-3'-phosphate
  modified_base 10: mod_base = OTHER; note = 2'-deoxy-2'-fluorouridine-3'-phosphate
  modified_base 11: mod_base = OTHER; note = 2'-deoxy-2'-fluorouridine-3'-phosphate
  modified_base 12: mod_base = OTHER; note = 2'-O-methyladenosine-3'-phosphate
  modified_base 13: mod_base = OTHER; note = 2'-O-methyladenosine-3'-phosphate
  modified_base 14: mod_base = OTHER; note = 2'-O-methylcytidine-3'-phosphate
  modified_base 15: mod_base = OTHER; note = 2'-O-methyluridine-3'-phosphate
  modified_base 16: mod_base = OTHER; note = 2'-O-methyluridine-3'-phosphate
  modified_base 17: mod_base = OTHER; note = 2'-O-methyluridine-3'-phosphate
  modified_base 18: mod_base = OTHER; note = 2'-O-methylguanosine-3'-phosphate
  modified_base 19: mod_base = OTHER; note = 2'-O-methyladenosine-3'-phosphate
  modified_base 20: mod_base = OTHER; note = 2'-O-methyluridine-3'-phosphate
  modified_base 21: mod_base = OTHER; note = 2'-O-methyladenosine
actctgtacttaactttgata

SEQ ID NO: 4310 - RNA, 21 nt, synthetic construct
  source 1..21: mol_type = other RNA
  modified_base 1: mod_base = OTHER; note = 2'-O-methylcytidine-3'-phosphate
  modified_base 2: mod_base = OTHER; note = 2'-O-methyluridine-3'-phosphate
  modified_base 3: mod_base = OTHER; note = 2'-O-methylcytidine-3'-phosphate
  modified_base 4: mod_base = OTHER; note = 2'-O-methyluridine-3'-phosphate
  modified_base 5: mod_base = OTHER; note = 2'-O-methylguanosine-3'-phosphate
  modified_base 6: mod_base = OTHER; note = 2'-O-methyluridine-3'-phosphate
  modified_base 7: mod_base = OTHER; note = 2'-deoxy-2'-fluoroadenosine-3'-phosphate
  modified_base 8: mod_base = OTHER; note = 2'-O-methylcytidine-3'-phosphate
  modified_base 9: mod_base = OTHER; note = 2'-deoxy-2'-fluorouridine-3'-phosphate
  modified_base 10: mod_base = OTHER; note = 2'-deoxy-2'-fluorouridine-3'-phosphate
  modified_base 11: mod_base = OTHER; note = 2'-deoxy-2'-fluoroadenosine-3'-phosphate
  modified_base 12: mod_base = OTHER; note = 2'-O-methyladenosine-3'-phosphate
  modified_base 13: mod_base = OTHER; note = 2'-O-methylcytidine-3'-phosphate
  modified_base 14: mod_base = OTHER; note = 2'-O-methyluridine-3'-phosphate
  modified_base 15: mod_base = OTHER; note = 2'-O-methyluridine-3'-phosphate
  modified_base 16: mod_base = OTHER; note = 2'-O-methyluridine-3'-phosphate
  modified_base 17: mod_base = OTHER; note = 2'-O-methylguanosine-3'-phosphate
  modified_base 18: mod_base = OTHER; note = 2'-O-methyladenosine-3'-phosphate
  modified_base 19: mod_base = OTHER; note = 2'-O-methyluridine-3'-phosphate
  modified_base 20: mod_base = OTHER; note = 2'-O-methyluridine-3'-phosphate
  modified_base 21: mod_base = OTHER; note = 2'-O-methyladenosine
ctctgtacttaactttgatta

SEQ ID NO: 4311 - RNA, 21 nt, synthetic construct
  source 1..21: mol_type = other RNA
  modified_base 1: mod_base = OTHER; note = 2'-O-methyluridine-3'-phosphate
  modified_base 2: mod_base = OTHER; note = 2'-O-methylcytidine-3'-phosphate
  modified_base 3: mod_base = OTHER; note = 2'-O-methyluridine-3'-phosphate
  modified_base 4: mod_base = OTHER; note = 2'-O-methylguanosine-3'-phosphate
  modified_base 5: mod_base = OTHER; note = 2'-O-methyluridine-3'-phosphate
  modified_base 6: mod_base = OTHER; note = 2'-O-methyladenosine-3'-phosphate
  modified_base 7: mod_base = OTHER; note = 2'-deoxy-2'-fluorocytidine-3'-phosphate
  modified_base 8: mod_base = OTHER; note = 2'-O-methyluridine-3'-phosphate
  modified_base 9: mod_base = OTHER; note = 2'-deoxy-2'-fluorouridine-3'-phosphate
  modified_base 10: mod_base = OTHER; note = 2'-deoxy-2'-fluoroadenosine-3'-phosphate
  modified_base 11: mod_base = OTHER; note = 2'-deoxy-2'-fluoroadenosine-3'-phosphate
  modified_base 12: mod_base = OTHER; note = 2'-O-methylcytidine-3'-phosphate
  modified_base 13: mod_base = OTHER; note = 2'-O-methyluridine-3'-phosphate
  modified_base 14: mod_base = OTHER; note = 2'-O-methyluridine-3'-phosphate
  modified_base 15: mod_base = OTHER; note = 2'-O-methyluridine-3'-phosphate
  modified_base 16: mod_base = OTHER; note = 2'-O-methylguanosine-3'-phosphate
  modified_base 17: mod_base = OTHER; note = 2'-O-methyladenosine-3'-phosphate
  modified_base 18: mod_base = OTHER; note = 2'-O-methyluridine-3'-phosphate
  modified_base 19: mod_base = OTHER; note = 2'-O-methyluridine-3'-phosphate
  modified_base 20: mod_base = OTHER; note = 2'-O-methyluridine-3'-phosphate
  modified_base 21: mod_base = OTHER; note = 2'-O-methyladenosine
tctgtacttaactttgattta

SEQ ID NO: 4312 - RNA, 21 nt, synthetic construct
  source 1..21: mol_type = other RNA
  modified_base 1: mod_base = OTHER; note = 2'-O-methylcytidine-3'-phosphate
  modified_base 2: mod_base = OTHER; note = 2'-O-methyluridine-3'-phosphate
  modified_base 3: mod_base = OTHER; note = 2'-O-methylguanosine-3'-phosphate
  modified_base 4: mod_base = OTHER; note = 2'-O-methyluridine-3'-phosphate
  modified_base 5: mod_base = OTHER; note = 2'-O-methyladenosine-3'-phosphate
  modified_base 6: mod_base = OTHER; note = 2'-O-methylcytidine-3'-phosphate
  modified_base 7: mod_base = OTHER; note = 2'-deoxy-2'-fluorouridine-3'-phosphate
  modified_base 8: mod_base = OTHER; note = 2'-O-methyluridine-3'-phosphate
  modified_base 9: mod_base = OTHER; note = 2'-deoxy-2'-fluoroadenosine-3'-phosphate
  modified_base 10: mod_base = OTHER; note = 2'-deoxy-2'-fluoroadenosine-3'-phosphate
  modified_base 11: mod_base = OTHER; note = 2'-deoxy-2'-fluorocytidine-3'-phosphate
  modified_base 12: mod_base = OTHER; note = 2'-O-methyluridine-3'-phosphate
  modified_base 13: mod_base = OTHER; note = 2'-O-methyluridine-3'-phosphate
  modified_base 14: mod_base = OTHER; note = 2'-O-methyluridine-3'-phosphate
  modified_base 15: mod_base = OTHER; note = 2'-O-methylguanosine-3'-phosphate
  modified_base 16: mod_base = OTHER; note = 2'-O-methyladenosine-3'-phosphate
  modified_base 17: mod_base = OTHER; note = 2'-O-methyluridine-3'-phosphate
  modified_base 18: mod_base = OTHER; note = 2'-O-methyluridine-3'-phosphate
  modified_base 19: mod_base = OTHER; note = 2'-O-methyluridine-3'-phosphate
  modified_base 20: mod_base = OTHER; note = 2'-O-methylguanosine-3'-phosphate
  modified_base 21: mod_base = OTHER; note = 2'-O-methyladenosine
ctgtacttaactttgatttga

SEQ ID NO: 4313 - RNA, 21 nt, synthetic construct
  source 1..21: mol_type = other RNA
  modified_base 1: mod_base = OTHER; note = 2'-O-methyluridine-3'-phosphate
  modified_base 2: mod_base = OTHER; note = 2'-O-methylguanosine-3'-phosphate
  modified_base 3: mod_base = OTHER; note = 2'-O-methyluridine-3'-phosphate
  modified_base 4: mod_base = OTHER; note = 2'-O-methyladenosine-3'-phosphate
  modified_base 5: mod_base = OTHER; note = 2'-O-methylcytidine-3'-phosphate
  modified_base 6: mod_base = OTHER; note = 2'-O-methyluridine-3'-phosphate
  modified_base 7: mod_base = OTHER; note = 2'-deoxy-2'-fluorouridine-3'-phosphate
  modified_base 8: mod_base = OTHER; note = 2'-O-methyladenosine-3'-phosphate
  modified_base 9: mod_base = OTHER; note = 2'-deoxy-2'-fluoroadenosine-3'-phosphate
  modified_base 10: mod_base = OTHER; note = 2'-deoxy-2'-fluorocytidine-3'-phosphate
  modified_base 11: mod_base = OTHER; note = 2'-deoxy-2'-fluorouridine-3'-phosphate
  modified_base 12: mod_base = OTHER; note = 2'-O-methyluridine-3'-phosphate
  modified_base 13: mod_base = OTHER; note = 2'-O-methyluridine-3'-phosphate
  modified_base 14: mod_base = OTHER; note = 2'-O-methylguanosine-3'-phosphate
  modified_base 15: mod_base = OTHER; note = 2'-O-methyladenosine-3'-phosphate
  modified_base 16: mod_base = OTHER; note = 2'-O-methyluridine-3'-phosphate
  modified_base 17: mod_base = OTHER; note = 2'-O-methyluridine-3'-phosphate
  modified_base 18: mod_base = OTHER; note = 2'-O-methyluridine-3'-phosphate
  modified_base 19: mod_base = OTHER; note = 2'-O-methylguanosine-3'-phosphate
  modified_base 20: mod_base = OTHER; note = 2'-O-methyladenosine-3'-phosphate
  modified_base 21: mod_base = OTHER; note = 2'-O-methyladenosine
tgtacttaactttgatttgaa

SEQ ID NO: 4314 - RNA, 21 nt, synthetic construct
  source 1..21: mol_type = other RNA
  modified_base 1: mod_base = OTHER; note = 2'-O-methylguanosine-3'-phosphate
  modified_base 2: mod_base = OTHER; note = 2'-O-methyluridine-3'-phosphate
  modified_base 3: mod_base = OTHER; note = 2'-O-methyladenosine-3'-phosphate
  modified_base 4: mod_base = OTHER; note = 2'-O-methylcytidine-3'-phosphate
  modified_base 5: mod_base = OTHER; note = 2'-O-methyluridine-3'-phosphate
  modified_base 6: mod_base = OTHER; note = 2'-O-methyluridine-3'-phosphate
  modified_base 7: mod_base = OTHER; note = 2'-deoxy-2'-fluoroadenosine-3'-phosphate
  modified_base 8: mod_base = OTHER; note = 2'-O-methyladenosine-3'-phosphate
  modified_base 9: mod_base = OTHER; note = 2'-deoxy-2'-fluorocytidine-3'-phosphate
  modified_base 10: mod_base = OTHER; note = 2'-deoxy-2'-fluorouridine-3'-phosphate
  modified_base 11: mod_base = OTHER; note = 2'-deoxy-2'-fluorouridine-3'-phosphate
  modified_base 12: mod_base = OTHER; note = 2'-O-methyluridine-3'-phosphate
  modified_base 13: mod_base = OTHER; note = 2'-O-methylguanosine-3'-phosphate
  modified_base 14: mod_base = OTHER; note = 2'-O-methyladenosine-3'-phosphate
  modified_base 15: mod_base = OTHER; note = 2'-O-methyluridine-3'-phosphate
  modified_base 16: mod_base = OTHER; note = 2'-O-methyluridine-3'-phosphate
  modified_base 17: mod_base = OTHER; note = 2'-O-methyluridine-3'-phosphate
  modified_base 18: mod_base = OTHER; note = 2'-O-methylguanosine-3'-phosphate
  modified_base 19: mod_base = OTHER; note = 2'-O-methyladenosine-3'-phosphate
  modified_base 20: mod_base = OTHER; note = 2'-O-methylguanosine-3'-phosphate
  modified_base 21: mod_base = OTHER; note = 2'-O-methyladenosine
gtacttaactttgatttgaga

SEQ ID NO: 4315 - RNA, 21 nt, synthetic construct
  source 1..21: mol_type = other RNA
  modified_base 1: mod_base = OTHER; note = 2'-O-methyluridine-3'-phosphate
  modified_base 2: mod_base = OTHER; note = 2'-O-methyladenosine-3'-phosphate
  modified_base 3: mod_base = OTHER; note = 2'-O-methylcytidine-3'-phosphate
  modified_base 4: mod_base = OTHER; note = 2'-O-methyluridine-3'-phosphate
  modified_base 5: mod_base = OTHER; note = 2'-O-methyluridine-3'-phosphate
  modified_base 6: mod_base = OTHER; note = 2'-O-methyladenosine-3'-phosphate
  modified_base 7: mod_base = OTHER; note = 2'-deoxy-2'-fluoroadenosine-3'-phosphate
  modified_base 8: mod_base = OTHER; note = 2'-O-methylcytidine-3'-phosphate
  modified_base 9: mod_base = OTHER; note = 2'-deoxy-2'-fluorouridine-3'-phosphate
  modified_base 10: mod_base = OTHER; note = 2'-deoxy-2'-fluorouridine-3'-phosphate
  modified_base 11: mod_base = OTHER; note = 2'-deoxy-2'-fluorouridine-3'-phosphate
  modified_base 12: mod_base = OTHER; note = 2'-O-methylguanosine-3'-phosphate
  modified_base 13: mod_base = OTHER; note = 2'-O-methyladenosine-3'-phosphate
  modified_base 14: mod_base = OTHER; note = 2'-O-methyluridine-3'-phosphate
  modified_base 15: mod_base = OTHER; note = 2'-O-methyluridine-3'-phosphate
  modified_base 16: mod_base = OTHER; note = 2'-O-methyluridine-3'-phosphate
  modified_base 17: mod_base = OTHER; note = 2'-O-methylguanosine-3'-phosphate
  modified_base 18: mod_base = OTHER; note = 2'-O-methyladenosine-3'-phosphate
  modified_base 19: mod_base = OTHER; note = 2'-O-methylguanosine-3'-phosphate
  modified_base 20: mod_base = OTHER; note = 2'-O-methyluridine-3'-phosphate
  modified_base 21: mod_base = OTHER; note = 2'-O-methyladenosine
tacttaactttgatttgagta

SEQ ID NO: 4316 - RNA, 21 nt, synthetic construct
  source 1..21: mol_type = other RNA
  modified_base 1: mod_base = OTHER; note = 2'-O-methyladenosine-3'-phosphate
  modified_base 2: mod_base = OTHER; note = 2'-O-methylcytidine-3'-phosphate
  modified_base 3: mod_base = OTHER; note = 2'-O-methyluridine-3'-phosphate
  modified_base 4: mod_base = OTHER; note = 2'-O-methyluridine-3'-phosphate
  modified_base 5: mod_base = OTHER; note = 2'-O-methyladenosine-3'-phosphate
  modified_base 6: mod_base = OTHER; note = 2'-O-methyladenosine-3'-phosphate
  modified_base 7: mod_base = OTHER; note = 2'-deoxy-2'-fluorocytidine-3'-phosphate
  modified_base 8: mod_base = OTHER; note = 2'-O-methyluridine-3'-phosphate
  modified_base 9: mod_base = OTHER; note = 2'-deoxy-2'-fluorouridine-3'-phosphate
  modified_base 10: mod_base = OTHER; note = 2'-deoxy-2'-fluorouridine-3'-phosphate
  modified_base 11: mod_base = OTHER; note = 2'-deoxy-2'-fluoroguanosine-3'-phosphate
  modified_base 12: mod_base = OTHER; note = 2'-O-methyladenosine-3'-phosphate
  modified_base 13: mod_base = OTHER; note = 2'-O-methyluridine-3'-phosphate
  modified_base 14: mod_base = OTHER; note = 2'-O-methyluridine-3'-phosphate
  modified_base 15: mod_base = OTHER; note = 2'-O-methyluridine-3'-phosphate
  modified_base 16: mod_base = OTHER; note = 2'-O-methylguanosine-3'-phosphate
  modified_base 17: mod_base = OTHER; note = 2'-O-methyladenosine-3'-phosphate
  modified_base 18: mod_base = OTHER; note = 2'-O-methylguanosine-3'-phosphate
  modified_base 19: mod_base = OTHER; note = 2'-O-methyluridine-3'-phosphate
  modified_base 20: mod_base = OTHER; note = 2'-O-methyladenosine-3'-phosphate
  modified_base 21: mod_base = OTHER; note = 2'-O-methyladenosine
acttaactttgatttgagtaa

SEQ ID NO: 4317 - RNA, 21 nt, synthetic construct
  source 1..21: mol_type = other RNA
  modified_base 1: mod_base = OTHER; note = 2'-O-methyluridine-3'-phosphate
  modified_base 2: mod_base = OTHER; note = 2'-O-methyluridine-3'-phosphate
  modified_base 3: mod_base = OTHER; note = 2'-O-methylguanosine-3'-phosphate
  modified_base 4: mod_base = OTHER; note = 2'-O-methyladenosine-3'-phosphate
  modified_base 5: mod_base = OTHER; note = 2'-O-methyluridine-3'-phosphate
  modified_base 6: mod_base = OTHER; note = 2'-O-methyluridine-3'-phosphate
  modified_base 7: mod_base = OTHER; note = 2'-deoxy-2'-fluorouridine-3'-phosphate
  modified_base 8: mod_base = OTHER; note = 2'-O-methylguanosine-3'-phosphate
  modified_base 9: mod_base = OTHER; note = 2'-deoxy-2'-fluoroadenosine-3'-phosphate
  modified_base 10: mod_base = OTHER; note = 2'-deoxy-2'-fluoroguanosine-3'-phosphate
  modified_base 11: mod_base = OTHER; note = 2'-deoxy-2'-fluorouridine-3'-phosphate
  modified_base 12: mod_base = OTHER; note = 2'-O-methyladenosine-3'-phosphate
  modified_base 13: mod_base = OTHER; note = 2'-O-methyladenosine-3'-phosphate
  modified_base 14: mod_base = OTHER; note = 2'-O-methyladenosine-3'-phosphate
  modified_base 15: mod_base = OTHER; note = 2'-O-methyluridine-3'-phosphate
  modified_base 16: mod_base = OTHER; note = 2'-O-methyluridine-3'-phosphate
  modified_base 17: mod_base = OTHER; note = 2'-O-methyluridine-3'-phosphate
  modified_base 18: mod_base = OTHER; note = 2'-O-methyluridine-3'-phosphate
  modified_base 19: mod_base = OTHER; note = 2'-O-methylguanosine-3'-phosphate
  modified_base 20: mod_base = OTHER; note = 2'-O-methylguanosine-3'-phosphate
  modified_base 21: mod_base = OTHER; note = 2'-O-methyladenosine
ttgatttgagtaaattttgga

SEQ ID NO: 4318 - RNA, 21 nt, synthetic construct
  source 1..21: mol_type = other RNA
  modified_base 1: mod_base = OTHER; note = 2'-O-methyluridine-3'-phosphate
  modified_base 2: mod_base = OTHER; note = 2'-O-methylguanosine-3'-phosphate
  modified_base 3: mod_base = OTHER; note = 2'-O-methyladenosine-3'-phosphate
  modified_base 4: mod_base = OTHER; note = 2'-O-methylguanosine-3'-phosphate
  modified_base 5: mod_base = OTHER; note = 2'-O-methyluridine-3'-phosphate
  modified_base 6: mod_base = OTHER; note = 2'-O-methyladenosine-3'-phosphate
  modified_base 7: mod_base = OTHER; note = 2'-deoxy-2'-fluoroadenosine-3'-phosphate
  modified_base 8: mod_base = OTHER; note = 2'-O-methyladenosine-3'-phosphate
  modified_base 9: mod_base = OTHER; note = 2'-deoxy-2'-fluorouridine-3'-phosphate
  modified_base 10: mod_base = OTHER; note = 2'-deoxy-2'-fluorouridine-3'-phosphate
  modified_base 11: mod_base = OTHER; note = 2'-deoxy-2'-fluorouridine-3'-phosphate
  modified_base 12: mod_base = OTHER; note = 2'-O-methyluridine-3'-phosphate
  modified_base 13: mod_base = OTHER; note = 2'-O-methylguanosine-3'-phosphate
  modified_base 14: mod_base = OTHER; note = 2'-O-methylguanosine-3'-phosphate
  modified_base 15: mod_base = OTHER; note = 2'-O-methyluridine-3'-phosphate
  modified_base 16: mod_base = OTHER; note = 2'-O-methyluridine-3'-phosphate
  modified_base 17: mod_base = OTHER; note = 2'-O-methyluridine-3'-phosphate
  modified_base 18: mod_base = OTHER; note = 2'-O-methyluridine-3'-phosphate
  modified_base 19: mod_base = OTHER; note = 2'-O-methylguanosine-3'-phosphate
  modified_base 20: mod_base = OTHER; note = 2'-O-methylguanosine-3'-phosphate
  modified_base 21: mod_base = OTHER; note = 2'-O-methyladenosine
tgagtaaattttggttttgga

SEQ ID NO: 4319 - RNA, 21 nt, synthetic construct
  source 1..21: mol_type = other RNA
  modified_base 1: mod_base = OTHER; note = 2'-O-methylguanosine-3'-phosphate
  modified_base 2: mod_base = OTHER; note = 2'-O-methyladenosine-3'-phosphate
  modified_base 3: mod_base = OTHER; note = 2'-O-methylguanosine-3'-phosphate
  modified_base 4: mod_base = OTHER; note = 2'-O-methyluridine-3'-phosphate
  modified_base 5: mod_base = OTHER; note = 2'-O-methyladenosine-3'-phosphate
  modified_base 6: mod_base = OTHER; note = 2'-O-methyladenosine-3'-phosphate
  modified_base 7: mod_base = OTHER; note = 2'-deoxy-2'-fluoroadenosine-3'-phosphate
  modified_base 8: mod_base = OTHER; note = 2'-O-methyluridine-3'-phosphate
  modified_base 9: mod_base = OTHER; note = 2'-deoxy-2'-fluorouridine-3'-phosphate
  modified_base 10: mod_base = OTHER; note = 2'-deoxy-2'-fluorouridine-3'-phosphate
  modified_base 11: mod_base = OTHER; note = 2'-deoxy-2'-fluorouridine-3'-phosphate
  modified_base 12: mod_base = OTHER; note = 2'-O-methylguanosine-3'-phosphate
  modified_base 13: mod_base = OTHER; note = 2'-O-methylguanosine-3'-phosphate
  modified_base 14: mod_base = OTHER; note = 2'-O-methyluridine-3'-phosphate
  modified_base 15: mod_base = OTHER; note = 2'-O-methyluridine-3'-phosphate
  modified_base 16: mod_base = OTHER; note = 2'-O-methyluridine-3'-phosphate
  modified_base 17: mod_base = OTHER; note = 2'-O-methyluridine-3'-phosphate
  modified_base 18: mod_base = OTHER; note = 2'-O-methylguanosine-3'-phosphate
  modified_base 19: mod_base = OTHER; note = 2'-O-methylguanosine-3'-phosphate
  modified_base 20: mod_base = OTHER; note = 2'-O-methyluridine-3'-phosphate
  modified_base 21: mod_base = OTHER; note = 2'-O-methyladenosine
gagtaaattttggttttggta

SEQ ID NO: 4320 - RNA, 21 nt, synthetic construct
  source 1..21: mol_type = other RNA
  modified_base 1: mod_base = OTHER; note = 2'-O-methyladenosine-3'-phosphate
  modified_base 2: mod_base = OTHER; note = 2'-O-methylguanosine-3'-phosphate
  modified_base 3: mod_base = OTHER; note = 2'-O-methyluridine-3'-phosphate
  modified_base 4: mod_base = OTHER; note = 2'-O-methyladenosine-3'-phosphate
  modified_base 5: mod_base = OTHER; note = 2'-O-methyladenosine-3'-phosphate
  modified_base 6: mod_base = OTHER; note = 2'-O-methyladenosine-3'-phosphate
  modified_base 7: mod_base = OTHER; note = 2'-deoxy-2'-fluorouridine-3'-phosphate
  modified_base 8: mod_base = OTHER; note = 2'-O-methyluridine-3'-phosphate
  modified_base 9: mod_base = OTHER; note = 2'-deoxy-2'-fluorouridine-3'-phosphate
  modified_base 10: mod_base = OTHER; note = 2'-deoxy-2'-fluorouridine-3'-phosphate
  modified_base 11: mod_base = OTHER; note = 2'-deoxy-2'-fluoroguanosine-3'-phosphate
  modified_base 12: mod_base = OTHER; note = 2'-O-methylguanosine-3'-phosphate
  modified_base 13: mod_base = OTHER; note = 2'-O-methyluridine-3'-phosphate
  modified_base 14: mod_base = OTHER; note = 2'-O-methyluridine-3'-phosphate
  modified_base 15: mod_base = OTHER; note = 2'-O-methyluridine-3'-phosphate
  modified_base 16: mod_base = OTHER; note = 2'-O-methyluridine-3'-phosphate
  modified_base 17: mod_base = OTHER; note = 2'-O-methylguanosine-3'-phosphate
  modified_base 18: mod_base = OTHER; note = 2'-O-methylguanosine-3'-phosphate
  modified_base 19: mod_base = OTHER; note = 2'-O-methyluridine-3'-phosphate
  modified_base 20: mod_base = OTHER; note = 2'-O-methylcytidine-3'-phosphate
  modified_base 21: mod_base = OTHER; note = 2'-O-methyladenosine
agtaaattttggttttggtca

SEQ ID NO: 4321 - RNA, 21 nt, synthetic construct
  source 1..21: mol_type = other RNA
  modified_base 1: mod_base = OTHER; note = 2'-O-methylguanosine-3'-phosphate
  modified_base 2: mod_base = OTHER; note = 2'-O-methyluridine-3'-phosphate
  modified_base 3: mod_base = OTHER; note = 2'-O-methyladenosine-3'-phosphate
  modified_base 4: mod_base = OTHER; note = 2'-O-methyladenosine-3'-phosphate
  modified_base 5: mod_base = OTHER; note = 2'-O-methyladenosine-3'-phosphate
  modified_base 6: mod_base = OTHER; note = 2'-O-methyluridine-3'-phosphate
  modified_base 7: mod_base = OTHER; note = 2'-deoxy-2'-fluorouridine-3'-phosphate
  modified_base 8: mod_base = OTHER; note = 2'-O-methyluridine-3'-phosphate
  modified_base 9: mod_base = OTHER; note = 2'-deoxy-2'-fluorouridine-3'-phosphate
  modified_base 10: mod_base = OTHER; note = 2'-deoxy-2'-fluoroguanosine-3'-phosphate
  modified_base 11: mod_base = OTHER; note = 2'-deoxy-2'-fluoroguanosine-3'-phosphate
  modified_base 12: mod_base = OTHER; note = 2'-O-methyluridine-3'-phosphate
  modified_base 13: mod_base = OTHER; note = 2'-O-methyluridine-3'-phosphate
  modified_base 14: mod_base = OTHER; note = 2'-O-methyluridine-3'-phosphate
  modified_base 15: mod_base = OTHER; note = 2'-O-methyluridine-3'-phosphate
  modified_base 16: mod_base = OTHER; note = 2'-O-methylguanosine-3'-phosphate
  modified_base 17: mod_base = OTHER; note = 2'-O-methylguanosine-3'-phosphate
  modified_base 18: mod_base = OTHER; note = 2'-O-methyluridine-3'-phosphate
  modified_base 19: mod_base = OTHER; note = 2'-O-methylcytidine-3'-phosphate
  modified_base 20: mod_base = OTHER; note = 2'-O-methyluridine-3'-phosphate
  modified_base 21: mod_base = OTHER; note = 2'-O-methyladenosine
gtaaattttggttttggtcta

SEQ ID NO: 4322 - RNA, 21 nt, synthetic construct
  source 1..21: mol_type = other RNA
  modified_base 1: mod_base = OTHER; note = 2'-O-methyluridine-3'-phosphate
  modified_base 2: mod_base = OTHER; note = 2'-O-methyladenosine-3'-phosphate
  modified_base 3: mod_base = OTHER; note = 2'-O-methyladenosine-3'-phosphate
  modified_base 4: mod_base = OTHER; note = 2'-O-methyladenosine-3'-phosphate
  modified_base 5: mod_base = OTHER; note = 2'-O-methyluridine-3'-phosphate
  modified_base 6: mod_base = OTHER; note = 2'-O-methyluridine-3'-phosphate
  modified_base 7: mod_base = OTHER; note = 2'-deoxy-2'-fluorouridine-3'-phosphate
  modified_base 8: mod_base = OTHER; note = 2'-O-methyluridine-3'-phosphate
  modified_base 9: mod_base = OTHER; note = 2'-deoxy-2'-fluoroguanosine-3'-phosphate
  modified_base 10: mod_base = OTHER; note = 2'-deoxy-2'-fluoroguanosine-3'-phosphate
  modified_base 11: mod_base = OTHER; note = 2'-deoxy-2'-fluorouridine-3'-phosphate
  modified_base 12: mod_base = OTHER; note = 2'-O-methyluridine-3'-phosphate
  modified_base 13: mod_base = OTHER; note = 2'-O-methyluridine-3'-phosphate
  modified_base 14: mod_base = OTHER; note = 2'-O-methyluridine-3'-phosphate
  modified_base 15: mod_base = OTHER; note = 2'-O-methylguanosine-3'-phosphate
  modified_base 16: mod_base = OTHER; note = 2'-O-methylguanosine-3'-phosphate
  modified_base 17: mod_base = OTHER; note = 2'-O-methyluridine-3'-phosphate
  modified_base 18: mod_base = OTHER; note = 2'-O-methylcytidine-3'-phosphate
  modified_base 19: mod_base = OTHER; note = 2'-O-methyluridine-3'-phosphate
  modified_base 20: mod_base = OTHER; note = 2'-O-methyluridine-3'-phosphate
  modified_base 21: mod_base = OTHER; note = 2'-O-methyladenosine
taaattttggttttggtctta

SEQ ID NO: 4323 - RNA, 21 nt, synthetic construct
  source 1..21: mol_type = other RNA
  modified_base 1: mod_base = OTHER; note = 2'-O-methyladenosine-3'-phosphate
  modified_base 2: mod_base = OTHER; note = 2'-O-methyladenosine-3'-phosphate
  modified_base 3: mod_base = OTHER; note = 2'-O-methyladenosine-3'-phosphate
  modified_base 4: mod_base = OTHER; note = 2'-O-methyluridine-3'-phosphate
  modified_base 5: mod_base = OTHER; note = 2'-O-methyluridine-3'-phosphate
  modified_base 6: mod_base = OTHER; note = 2'-O-methyluridine-3'-phosphate
  modified_base 7: mod_base = OTHER; note = 2'-deoxy-2'-fluorouridine-3'-phosphate
  modified_base 8: mod_base = OTHER; note = 2'-O-methylguanosine-3'-phosphate
  modified_base 9: mod_base = OTHER; note = 2'-deoxy-2'-fluoroguanosine-3'-phosphate
  modified_base 10: mod_base = OTHER; note = 2'-deoxy-2'-fluorouridine-3'-phosphate
  modified_base 11: mod_base = OTHER; note = 2'-deoxy-2'-fluorouridine-3'-phosphate
  modified_base 12: mod_base = OTHER; note = 2'-O-methyluridine-3'-phosphate
  modified_base 13: mod_base = OTHER; note = 2'-O-methyluridine-3'-phosphate
  modified_base 14: mod_base = OTHER; note = 2'-O-methylguanosine-3'-phosphate
  modified_base 15: mod_base = OTHER; note = 2'-O-methylguanosine-3'-phosphate
  modified_base 16: mod_base = OTHER; note = 2'-O-methyluridine-3'-phosphate
  modified_base 17: mod_base = OTHER; note = 2'-O-methylcytidine-3'-phosphate
  modified_base 18: mod_base = OTHER; note = 2'-O-methyluridine-3'-phosphate
  modified_base 19: mod_base = OTHER; note = 2'-O-methyluridine-3'-phosphate
  modified_base 20: mod_base = OTHER; note = 2'-O-methylcytidine-3'-phosphate
  modified_base 21: mod_base = OTHER; note = 2'-O-methyladenosine
aaattttggttttggtcttca

SEQ ID NO: 4324 - RNA, 21 nt, synthetic construct
  source 1..21: mol_type = other RNA
  modified_base 1: mod_base = OTHER; note = 2'-O-methyladenosine-3'-phosphate
  modified_base 2: mod_base = OTHER; note = 2'-O-methyluridine-3'-phosphate
  modified_base 3: mod_base = OTHER; note = 2'-O-methyluridine-3'-phosphate
  modified_base 4: mod_base = OTHER; note = 2'-O-methyluridine-3'-phosphate
  modified_base 5: mod_base = OTHER; note = 2'-O-methyluridine-3'-phosphate
  modified_base 6: mod_base = OTHER; note = 2'-O-methylguanosine-3'-phosphate
  modified_base 7: mod_base = OTHER; note = 2'-deoxy-2'-fluoroguanosine-3'-phosphate
  modified_base 8: mod_base = OTHER; note = 2'-O-methyluridine-3'-phosphate
  modified_base 9: mod_base = OTHER; note = 2'-deoxy-2'-fluorouridine-3'-phosphate
  modified_base 10: mod_base = OTHER; note = 2'-deoxy-2'-fluorouridine-3'-phosphate
  modified_base 11: mod_base = OTHER; note = 2'-deoxy-2'-fluorouridine-3'-phosphate
  modified_base 12: mod_base = OTHER; note = 2'-O-methylguanosine-3'-phosphate
  modified_base 13: mod_base = OTHER; note = 2'-O-methylguanosine-3'-phosphate
  modified_base 14: mod_base = OTHER; note = 2'-O-methyluridine-3'-phosphate
  modified_base 15: mod_base = OTHER; note = 2'-O-methylcytidine-3'-phosphate
  modified_base 16: mod_base = OTHER; note = 2'-O-methyluridine-3'-phosphate
  modified_base 17: mod_base = OTHER; note = 2'-O-methyluridine-3'-phosphate
  modified_base 18: mod_base = OTHER; note = 2'-O-methylcytidine-3'-phosphate
  modified_base 19: mod_base = OTHER; note = 2'-O-methyladenosine-3'-phosphate
  modified_base 20: mod_base = OTHER; note = 2'-O-methyladenosine-3'-phosphate
  modified_base 21: mod_base = OTHER; note = 2'-O-methyladenosine
attttggttttggtcttcaaa

SEQ ID NO: 4325 - RNA, 21 nt, synthetic construct
  source 1..21: mol_type = other RNA
  modified_base 1: mod_base = OTHER; note = 2'-O-methyluridine-3'-phosphate
  modified_base 2: mod_base = OTHER; note = 2'-O-methyluridine-3'-phosphate
  modified_base 3: mod_base = OTHER; note = 2'-O-methyluridine-3'-phosphate
  modified_base 4: mod_base = OTHER; note = 2'-O-methylguanosine-3'-phosphate
  modified_base 5: mod_base = OTHER; note = 2'-O-methylguanosine-3'-phosphate
  modified_base 6: mod_base = OTHER; note = 2'-O-methyluridine-3'-phosphate
  modified_base 7: mod_base = OTHER; note = 2'-deoxy-2'-fluorouridine-3'-phosphate
  modified_base 8: mod_base = OTHER; note = 2'-O-methyluridine-3'-phosphate
  modified_base 9: mod_base = OTHER; note = 2'-deoxy-2'-fluorouridine-3'-phosphate
  modified_base 10: mod_base = OTHER; note = 2'-deoxy-2'-fluoroguanosine-3'-phosphate
  modified_base 11: mod_base = OTHER; note = 2'-deoxy-2'-fluoroguanosine-3'-phosphate
  modified_base 12: mod_base = OTHER; note = 2'-O-methyluridine-3'-phosphate
  modified_base 13: mod_base = OTHER; note = 2'-O-methylcytidine-3'-phosphate
  modified_base 14: mod_base = OTHER; note = 2'-O-methyluridine-3'-phosphate
  modified_base 15: mod_base = OTHER; note = 2'-O-methyluridine-3'-phosphate
  modified_base 16: mod_base = OTHER; note = 2'-O-methylcytidine-3'-phosphate
  modified_base 17: mod_base = OTHER; note = 2'-O-methyladenosine-3'-phosphate
  modified_base 18: mod_base = OTHER; note = 2'-O-methyladenosine-3'-phosphate
  modified_base 19: mod_base = OTHER; note = 2'-O-methylcytidine-3'-phosphate
  modified_base 20: mod_base = OTHER; note = 2'-O-methyladenosine-3'-phosphate
  modified_base 21: mod_base = OTHER; note = 2'-O-methyladenosine
tttggttttggtcttcaacaa

SEQ ID NO: 4326 - RNA, 21 nt, synthetic construct
  source 1..21: mol_type = other RNA
  modified_base 1: mod_base = OTHER; note = 2'-O-methyluridine-3'-phosphate
  modified_base 2: mod_base = OTHER; note = 2'-O-methyluridine-3'-phosphate
  modified_base 3: mod_base = OTHER; note = 2'-O-methylguanosine-3'-phosphate
  modified_base 4: mod_base = OTHER; note = 2'-O-methylguanosine-3'-phosphate
  modified_base 5: mod_base = OTHER; note = 2'-O-methyluridine-3'-phosphate
  modified_base 6: mod_base = OTHER; note = 2'-O-methyluridine-3'-phosphate
  modified_base 7: mod_base = OTHER; note = 2'-deoxy-2'-fluorouridine-3'-phosphate
  modified_base 8: mod_base = OTHER; note = 2'-O-methyluridine-3'-phosphate
  modified_base 9: mod_base = OTHER; note = 2'-deoxy-2'-fluoroguanosine-3'-phosphate
  modified_base 10: mod_base = OTHER; note = 2'-deoxy-2'-fluoroguanosine-3'-phosphate
  modified_base 11: mod_base = OTHER; note = 2'-deoxy-2'-fluorouridine-3'-phosphate
  modified_base 12: mod_base = OTHER; note = 2'-O-methylcytidine-3'-phosphate
  modified_base 13: mod_base = OTHER; note = 2'-O-methyluridine-3'-phosphate
  modified_base 14: mod_base = OTHER; note = 2'-O-methyluridine-3'-phosphate
  modified_base 15: mod_base = OTHER; note = 2'-O-methylcytidine-3'-phosphate
  modified_base 16: mod_base = OTHER; note = 2'-O-methyladenosine-3'-phosphate
  modified_base 17: mod_base = OTHER; note = 2'-O-methyladenosine-3'-phosphate
  modified_base 18: mod_base = OTHER; note = 2'-O-methylcytidine-3'-phosphate
  modified_base 19: mod_base = OTHER; note = 2'-O-methyladenosine-3'-phosphate
  modified_base 20: mod_base = OTHER; note = 2'-O-methyluridine-3'-phosphate
  modified_base 21: mod_base = OTHER; note = 2'-O-methyladenosine
ttggttttggtcttcaacata

SEQ ID NO: 4327 - RNA, 21 nt, synthetic construct
  source 1..21: mol_type = other RNA
  modified_base 1: mod_base = OTHER; note = 2'-O-methyluridine-3'-phosphate
  modified_base 2: mod_base = OTHER; note = 2'-O-methylguanosine-3'-phosphate
  modified_base 3: mod_base = OTHER; note = 2'-O-methylguanosine-3'-phosphate
  modified_base 4: mod_base = OTHER; note = 2'-O-methyluridine-3'-phosphate
  modified_base 5: mod_base = OTHER; note = 2'-O-methyluridine-3'-phosphate
  modified_base 6: mod_base = OTHER; note = 2'-O-methyluridine-3'-phosphate
  modified_base 7: mod_base = OTHER; note = 2'-deoxy-2'-fluorouridine-3'-phosphate
  modified_base 8: mod_base = OTHER; note = 2'-O-methylguanosine-3'-phosphate
  modified_base 9: mod_base = OTHER; note = 2'-deoxy-2'-fluoroguanosine-3'-phosphate
  modified_base 10: mod_base = OTHER; note = 2'-deoxy-2'-fluorouridine-3'-phosphate
  modified_base 11: mod_base = OTHER; note = 2'-deoxy-2'-fluorocytidine-3'-phosphate
  modified_base 12: mod_base = OTHER; note = 2'-O-methyluridine-3'-phosphate
  modified_base 13: mod_base = OTHER; note = 2'-O-methyluridine-3'-phosphate
  modified_base 14: mod_base = OTHER; note = 2'-O-methylcytidine-3'-phosphate
  modified_base 15: mod_base = OTHER; note = 2'-O-methyladenosine-3'-phosphate
  modified_base 16: mod_base = OTHER; note = 2'-O-methyladenosine-3'-phosphate
  modified_base 17: mod_base = OTHER; note = 2'-O-methylcytidine-3'-phosphate
  modified_base 18: mod_base = OTHER; note = 2'-O-methyladenosine-3'-phosphate
  modified_base 19: mod_base = OTHER; note = 2'-O-methyluridine-3'-phosphate
  modified_base 20: mod_base = OTHER; note = 2'-O-methyluridine-3'-phosphate
  modified_base 21: mod_base = OTHER; note = 2'-O-methyladenosine
tggttttggtcttcaacatta

SEQ ID NO: 4328 - RNA, 21 nt, synthetic construct
  source 1..21: mol_type = other RNA
  modified_base 1: mod_base = OTHER; note = 2'-O-methylguanosine-3'-phosphate
  modified_base 2: mod_base = OTHER; note = 2'-O-methylguanosine-3'-phosphate
  modified_base 3: mod_base = OTHER; note = 2'-O-methyluridine-3'-phosphate
  modified_base 4: mod_base = OTHER; note = 2'-O-methyluridine-3'-phosphate
  modified_base 5: mod_base = OTHER; note = 2'-O-methyluridine-3'-phosphate
  modified_base 6: mod_base = OTHER; note = 2'-O-methyluridine-3'-phosphate
  modified_base 7: mod_base = OTHER; note = 2'-deoxy-2'-fluoroguanosine-3'-phosphate
  modified_base 8: mod_base = OTHER; note = 2'-O-methylguanosine-3'-phosphate
  modified_base 9: mod_base = OTHER; note = 2'-deoxy-2'-fluorouridine-3'-phosphate
  modified_base 10: mod_base = OTHER; note = 2'-deoxy-2'-fluorocytidine-3'-phosphate
  modified_base 11: mod_base = OTHER; note = 2'-deoxy-2'-fluorouridine-3'-phosphate
  modified_base 12: mod_base = OTHER; note = 2'-O-methyluridine-3'-phosphate
  modified_base 13: mod_base = OTHER; note = 2'-O-methylcytidine-3'-phosphate
  modified_base 14: mod_base = OTHER; note = 2'-O-methyladenosine-3'-phosphate
  modified_base 15: mod_base = OTHER; note = 2'-O-methyladenosine-3'-phosphate
  modified_base 16: mod_base = OTHER; note = 2'-O-methylcytidine-3'-phosphate
  modified_base 17: mod_base = OTHER; note = 2'-O-methyladenosine-3'-phosphate
  modified_base 18: mod_base = OTHER; note = 2'-O-methyluridine-3'-phosphate
  modified_base 19: mod_base = OTHER; note = 2'-O-methyluridine-3'-phosphate
  modified_base 20: mod_base = OTHER; note = 2'-O-methyluridine-3'-phosphate
  modified_base 21: mod_base = OTHER; note = 2'-O-methyladenosine
ggttttggtcttcaacattta

SEQ ID NO: 4329 - RNA, 21 nt, synthetic construct
  source 1..21: mol_type = other RNA
  modified_base 1: mod_base = OTHER; note = 2'-O-methylguanosine-3'-phosphate
  modified_base 2: mod_base = OTHER; note = 2'-O-methyluridine-3'-phosphate
  modified_base 3: mod_base = OTHER; note = 2'-O-methyluridine-3'-phosphate
  modified_base 4: mod_base = OTHER; note = 2'-O-methyluridine-3'-phosphate
  modified_base 5: mod_base = OTHER; note = 2'-O-methyluridine-3'-phosphate
  modified_base 6: mod_base = OTHER; note = 2'-O-methylguanosine-3'-phosphate
  modified_base 7: mod_base = OTHER; note = 2'-deoxy-2'-fluoroguanosine-3'-phosphate
  modified_base 8: mod_base = OTHER; note = 2'-O-methyluridine-3'-phosphate
  modified_base 9: mod_base = OTHER; note = 2'-deoxy-2'-fluorocytidine-3'-phosphate
  modified_base 10: mod_base = OTHER; note = 2'-deoxy-2'-fluorouridine-3'-phosphate
  modified_base 11: mod_base = OTHER; note = 2'-deoxy-2'-fluorouridine-3'-phosphate
  modified_base 12: mod_base = OTHER; note = 2'-O-methylcytidine-3'-phosphate
  modified_base 13: mod_base = OTHER; note = 2'-O-methyladenosine-3'-phosphate
  modified_base 14: mod_base = OTHER; note = 2'-O-methyladenosine-3'-phosphate
  modified_base 15: mod_base = OTHER; note = 2'-O-methylcytidine-3'-phosphate
  modified_base 16: mod_base = OTHER; note = 2'-O-methyladenosine-3'-phosphate
  modified_base 17: mod_base = OTHER; note = 2'-O-methyluridine-3'-phosphate
  modified_base 18: mod_base = OTHER; note = 2'-O-methyluridine-3'-phosphate
  modified_base 19: mod_base = OTHER; note = 2'-O-methyluridine-3'-phosphate
  modified_base 20: mod_base = OTHER; note = 2'-O-methyluridine-3'-phosphate
  modified_base 21: mod_base = OTHER; note = 2'-O-methyladenosine
gttttggtcttcaacatttta

SEQ ID NO: 4330 - RNA, 21 nt, synthetic construct
  source 1..21: mol_type = other RNA
  modified_base 1: mod_base = OTHER; note = 2'-O-methyluridine-3'-phosphate
  modified_base 2: mod_base = OTHER; note = 2'-O-methyluridine-3'-phosphate
  modified_base 3: mod_base = OTHER; note = 2'-O-methyluridine-3'-phosphate
  modified_base 4: mod_base = OTHER; note = 2'-O-methyluridine-3'-phosphate
  modified_base 5: mod_base = OTHER; note = 2'-O-methylguanosine-3'-phosphate
  modified_base 6: mod_base = OTHER; note = 2'-O-methylguanosine-3'-phosphate
  modified_base 7: mod_base = OTHER; note = 2'-deoxy-2'-fluorouridine-3'-phosphate
  modified_base 8: mod_base = OTHER; note = 2'-O-methylcytidine-3'-phosphate
  modified_base 9: mod_base = OTHER; note = 2'-deoxy-2'-fluorouridine-3'-phosphate
  modified_base 10: mod_base = OTHER; note = 2'-deoxy-2'-fluorouridine-3'-phosphate
  modified_base 11: mod_base = OTHER; note = 2'-deoxy-2'-fluorocytidine-3'-phosphate
  modified_base 12: mod_base = OTHER; note = 2'-O-methyladenosine-3'-phosphate
  modified_base 13: mod_base = OTHER; note = 2'-O-methyladenosine-3'-phosphate
  modified_base 14: mod_base = OTHER; note = 2'-O-methylcytidine-3'-phosphate
  modified_base 15: mod_base = OTHER; note = 2'-O-methyladenosine-3'-phosphate
  modified_base 16: mod_base = OTHER; note = 2'-O-methyluridine-3'-phosphate
  modified_base 17: mod_base = OTHER; note = 2'-O-methyluridine-3'-phosphate
  modified_base 18: mod_base = OTHER; note = 2'-O-methyluridine-3'-phosphate
  modified_base 19: mod_base = OTHER; note = 2'-O-methyluridine-3'-phosphate
  modified_base 20: mod_base = OTHER; note = 2'-O-methylcytidine-3'-phosphate
  modified_base 21: mod_base = OTHER; note = 2'-O-methyladenosine
ttttggtcttcaacattttca

SEQ ID NO: 4331 - RNA, 21 nt, synthetic construct
  source 1..21: mol_type = other RNA
  modified_base 1: mod_base = OTHER; note = 2'-O-methyluridine-3'-phosphate
  modified_base 2: mod_base = OTHER; note = 2'-O-methyluridine-3'-phosphate
  modified_base 3: mod_base = OTHER; note = 2'-O-methyluridine-3'-phosphate
  modified_base 4: mod_base = OTHER; note = 2'-O-methylguanosine-3'-phosphate
  modified_base 5: mod_base = OTHER; note = 2'-O-methylguanosine-3'-phosphate
  modified_base 6: mod_base = OTHER; note = 2'-O-methyluridine-3'-phosphate
  modified_base 7: mod_base = OTHER; note = 2'-deoxy-2'-fluorocytidine-3'-phosphate
  modified_base 8: mod_base = OTHER; note = 2'-O-methyluridine-3'-phosphate
  modified_base 9: mod_base = OTHER; note = 2'-deoxy-2'-fluorouridine-3'-phosphate
  modified_base 10: mod_base = OTHER; note = 2'-deoxy-2'-fluorocytidine-3'-phosphate
  modified_base 11: mod_base = OTHER; note = 2'-deoxy-2'-fluoroadenosine-3'-phosphate
  modified_base 12: mod_base = OTHER; note = 2'-O-methyladenosine-3'-phosphate
  modified_base 13: mod_base = OTHER; note = 2'-O-methylcytidine-3'-phosphate
  modified_base 14: mod_base = OTHER; note = 2'-O-methyladenosine-3'-phosphate
  modified_base 15: mod_base = OTHER; note = 2'-O-methyluridine-3'-phosphate
  modified_base 16: mod_base = OTHER; note = 2'-O-methyluridine-3'-phosphate
  modified_base 17: mod_base = OTHER; note = 2'-O-methyluridine-3'-phosphate
  modified_base 18: mod_base = OTHER; note = 2'-O-methyluridine-3'-phosphate
  modified_base 19: mod_base = OTHER; note = 2'-O-methylcytidine-3'-phosphate
  modified_base 20: mod_base = OTHER; note = 2'-O-methyladenosine-3'-phosphate
  modified_base 21: mod_base = OTHER; note = 2'-O-methyladenosine
tttggtcttcaacattttcaa

SEQ ID NO: 4332 - RNA, 21 nt, synthetic construct
  source 1..21: mol_type = other RNA
  modified_base 1: mod_base = OTHER; note = 2'-O-methyluridine-3'-phosphate
  modified_base 2: mod_base = OTHER; note = 2'-O-methyluridine-3'-phosphate
  modified_base 3: mod_base = OTHER; note = 2'-O-methylguanosine-3'-phosphate
  modified_base 4: mod_base = OTHER; note = 2'-O-methylguanosine-3'-phosphate
  modified_base 5: mod_base = OTHER; note = 2'-O-methyluridine-3'-phosphate
  modified_base 6: mod_base = OTHER; note = 2'-O-methylcytidine-3'-phosphate
  modified_base 7: mod_base = OTHER; note = 2'-deoxy-2'-fluorouridine-3'-phosphate
  modified_base 8: mod_base = OTHER; note = 2'-O-methyluridine-3'-phosphate
  modified_base 9: mod_base = OTHER; note = 2'-deoxy-2'-fluorocytidine-3'-phosphate
  modified_base 10: mod_base = OTHER; note = 2'-deoxy-2'-fluoroadenosine-3'-phosphate
  modified_base 11: mod_base = OTHER; note = 2'-deoxy-2'-fluoroadenosine-3'-phosphate
  modified_base 12: mod_base = OTHER; note = 2'-O-methylcytidine-3'-phosphate
  modified_base 13: mod_base = OTHER; note = 2'-O-methyladenosine-3'-phosphate
  modified_base 14: mod_base = OTHER; note = 2'-O-methyluridine-3'-phosphate
  modified_base 15: mod_base = OTHER; note = 2'-O-methyluridine-3'-phosphate
  modified_base 16: mod_base = OTHER; note = 2'-O-methyluridine-3'-phosphate
  modified_base 17: mod_base = OTHER; note = 2'-O-methyluridine-3'-phosphate
  modified_base 18: mod_base = OTHER; note = 2'-O-methylcytidine-3'-phosphate
  modified_base 19: mod_base = OTHER; note = 2'-O-methyladenosine-3'-phosphate
  modified_base 20: mod_base = OTHER; note = 2'-O-methyluridine-3'-phosphate
  modified_base 21: mod_base = OTHER; note = 2'-O-methyladenosine
ttggtcttcaacattttcata

SEQ ID NO: 4333 - RNA, 21 nt, synthetic construct
  source 1..21: mol_type = other RNA
  modified_base 1: mod_base = OTHER; note = 2'-O-methyluridine-3'-phosphate
  modified_base 2: mod_base = OTHER; note = 2'-O-methylguanosine-3'-phosphate
  modified_base 3: mod_base = OTHER; note = 2'-O-methylguanosine-3'-phosphate
  modified_base 4: mod_base = OTHER; note = 2'-O-methyluridine-3'-phosphate
  modified_base 5: mod_base = OTHER; note = 2'-O-methylcytidine-3'-phosphate
  modified_base 6: mod_base = OTHER; note = 2'-O-methyluridine-3'-phosphate
  modified_base 7: mod_base = OTHER; note = 2'-deoxy-2'-fluorouridine-3'-phosphate
  modified_base 8: mod_base = OTHER; note = 2'-O-methylcytidine-3'-phosphate
  modified_base 9: mod_base = OTHER; note = 2'-deoxy-2'-fluoroadenosine-3'-phosphate
  modified_base 10: mod_base = OTHER; note = 2'-deoxy-2'-fluoroadenosine-3'-phosphate
  modified_base 11: mod_base = OTHER; note = 2'-deoxy-2'-fluorocytidine-3'-phosphate
  modified_base 12: mod_base = OTHER; note = 2'-O-methyladenosine-3'-phosphate
  modified_base 13: mod_base = OTHER; note = 2'-O-methyluridine-3'-phosphate
  modified_base 14: mod_base = OTHER; note = 2'-O-methyluridine-3'-phosphate
  modified_base 15: mod_base = OTHER; note = 2'-O-methyluridine-3'-phosphate
  modified_base 16: mod_base = OTHER; note = 2'-O-methyluridine-3'-phosphate
  modified_base 17: mod_base = OTHER; note = 2'-O-methylcytidine-3'-phosphate
  modified_base 18: mod_base = OTHER; note = 2'-O-methyladenosine-3'-phosphate
  modified_base 19: mod_base = OTHER; note = 2'-O-methyluridine-3'-phosphate
  modified_base 20: mod_base = OTHER; note = 2'-O-methylguanosine-3'-phosphate
  modified_base 21: mod_base = OTHER; note = 2'-O-methyladenosine
tggtcttcaacattttcatga

SEQ ID NO: 4334 - RNA, 21 nt, synthetic construct
  source 1..21: mol_type = other RNA
  modified_base 1: mod_base = OTHER; note = 2'-O-methylguanosine-3'-phosphate
  modified_base 2: mod_base = OTHER; note = 2'-O-methylguanosine-3'-phosphate
  modified_base 3: mod_base = OTHER; note = 2'-O-methyluridine-3'-phosphate
  modified_base 4: mod_base = OTHER; note = 2'-O-methylcytidine-3'-phosphate
  modified_base 5: mod_base = OTHER; note = 2'-O-methyluridine-3'-phosphate
  modified_base 6: mod_base = OTHER; note = 2'-O-methyluridine-3'-phosphate
  modified_base 7: mod_base = OTHER; note = 2'-deoxy-2'-fluorocytidine-3'-phosphate
  modified_base 8: mod_base = OTHER; note = 2'-O-methyladenosine-3'-phosphate
  modified_base 9: mod_base = OTHER; note = 2'-deoxy-2'-fluoroadenosine-3'-phosphate
  modified_base 10: mod_base = OTHER; note = 2'-deoxy-2'-fluorocytidine-3'-phosphate
  modified_base 11: mod_base = OTHER; note = 2'-deoxy-2'-fluoroadenosine-3'-phosphate
  modified_base 12: mod_base = OTHER; note = 2'-O-methyluridine-3'-phosphate
  modified_base 13: mod_base = OTHER; note = 2'-O-methyluridine-3'-phosphate
  modified_base 14: mod_base = OTHER; note = 2'-O-methyluridine-3'-phosphate
  modified_base 15: mod_base = OTHER; note = 2'-O-methyluridine-3'-phosphate
  modified_base 16: mod_base = OTHER; note = 2'-O-methylcytidine-3'-phosphate
  modified_base 17: mod_base = OTHER; note = 2'-O-methyladenosine-3'-phosphate
  modified_base 18: mod_base = OTHER; note = 2'-O-methyluridine-3'-phosphate
  modified_base 19: mod_base = OTHER; note = 2'-O-methylguanosine-3'-phosphate
  modified_base 20: mod_base = OTHER; note = 2'-O-methylcytidine-3'-phosphate
  modified_base 21: mod_base = OTHER; note = 2'-O-methyladenosine
ggtcttcaacattttcatgca

SEQ ID NO: 4335 - RNA, 21 nt, synthetic construct
  source 1..21: mol_type = other RNA
  modified_base 1: mod_base = OTHER; note = 2'-O-methylguanosine-3'-phosphate
  modified_base 2: mod_base = OTHER; note = 2'-O-methyluridine-3'-phosphate
  modified_base 3: mod_base = OTHER; note = 2'-O-methylcytidine-3'-phosphate
  modified_base 4: mod_base = OTHER; note = 2'-O-methyluridine-3'-phosphate
  modified_base 5: mod_base = OTHER; note = 2'-O-methyluridine-3'-phosphate
  modified_base 6: mod_base = OTHER; note = 2'-O-methylcytidine-3'-phosphate
  modified_base 7: mod_base = OTHER; note = 2'-deoxy-2'-fluoroadenosine-3'-phosphate
  modified_base 8: mod_base = OTHER; note = 2'-O-methyladenosine-3'-phosphate
  modified_base 9: mod_base = OTHER; note = 2'-deoxy-2'-fluorocytidine-3'-phosphate
  modified_base 10: mod_base = OTHER; note = 2'-deoxy-2'-fluoroadenosine-3'-phosphate
  modified_base 11: mod_base = OTHER; note = 2'-deoxy-2'-fluorouridine-3'-phosphate
  modified_base 12: mod_base = OTHER; note = 2'-O-methyluridine-3'-phosphate
  modified_base 13: mod_base = OTHER; note = 2'-O-methyluridine-3'-phosphate
  modified_base 14: mod_base = OTHER; note = 2'-O-methyluridine-3'-phosphate
  modified_base 15: mod_base = OTHER; note = 2'-O-methylcytidine-3'-phosphate
  modified_base 16: mod_base = OTHER; note = 2'-O-methyladenosine-3'-phosphate
  modified_base 17: mod_base = OTHER; note = 2'-O-methyluridine-3'-phosphate
  modified_base 18: mod_base = OTHER; note = 2'-O-methylguanosine-3'-phosphate
  modified_base 19: mod_base = OTHER; note = 2'-O-methylcytidine-3'-phosphate
  modified_base 20: mod_base = OTHER; note = 2'-O-methyluridine-3'-phosphate
  modified_base 21: mod_base = OTHER; note = 2'-O-methyladenosine
gtcttcaacattttcatgcta

SEQ ID NO: 4336 - RNA, 21 nt, synthetic construct
  source 1..21: mol_type = other RNA
  modified_base 1: mod_base = OTHER; note = 2'-O-methylcytidine-3'-phosphate
  modified_base 2: mod_base = OTHER; note = 2'-O-methyluridine-3'-phosphate
  modified_base 3: mod_base = OTHER; note = 2'-O-methyluridine-3'-phosphate
  modified_base 4: mod_base = OTHER; note = 2'-O-methylcytidine-3'-phosphate
  modified_base 5: mod_base = OTHER; note = 2'-O-methyladenosine-3'-phosphate
  modified_base 6: mod_base = OTHER; note = 2'-O-methyladenosine-3'-phosphate
  modified_base 7: mod_base = OTHER; note = 2'-deoxy-2'-fluorocytidine-3'-phosphate
  modified_base 8: mod_base = OTHER; note = 2'-O-methyladenosine-3'-phosphate
  modified_base 9: mod_base = OTHER; note = 2'-deoxy-2'-fluorouridine-3'-phosphate
  modified_base 10: mod_base = OTHER; note = 2'-deoxy-2'-fluorouridine-3'-phosphate
  modified_base 11: mod_base = OTHER; note = 2'-deoxy-2'-fluorouridine-3'-phosphate
  modified_base 12: mod_base = OTHER; note = 2'-O-methyluridine-3'-phosphate
  modified_base 13: mod_base = OTHER; note = 2'-O-methylcytidine-3'-phosphate
  modified_base 14: mod_base = OTHER; note = 2'-O-methyladenosine-3'-phosphate
  modified_base 15: mod_base = OTHER; note = 2'-O-methyluridine-3'-phosphate
  modified_base 16: mod_base = OTHER; note = 2'-O-methylguanosine-3'-phosphate
  modified_base 17: mod_base = OTHER; note = 2'-O-methylcytidine-3'-phosphate
  modified_base 18: mod_base = OTHER; note = 2'-O-methyluridine-3'-phosphate
  modified_base 19: mod_base = OTHER; note = 2'-O-methylcytidine-3'-phosphate
  modified_base 20: mod_base = OTHER; note = 2'-O-methyluridine-3'-phosphate
  modified_base 21: mod_base = OTHER; note = 2'-O-methyladenosine
cttcaacattttcatgctcta

SEQ ID NO: 4337 - RNA, 21 nt, synthetic construct
  source 1..21: mol_type = other RNA
  modified_base 1: mod_base = OTHER; note = 2'-O-methyluridine-3'-phosphate
  modified_base 2: mod_base = OTHER; note = 2'-O-methyluridine-3'-phosphate
  modified_base 3: mod_base = OTHER; note = 2'-O-methylcytidine-3'-phosphate
  modified_base 4: mod_base = OTHER; note = 2'-O-methyladenosine-3'-phosphate
  modified_base 5: mod_base = OTHER; note = 2'-O-methyladenosine-3'-phosphate
  modified_base 6: mod_base = OTHER; note = 2'-O-methylcytidine-3'-phosphate
  modified_base 7: mod_base = OTHER; note = 2'-deoxy-2'-fluoroadenosine-3'-phosphate
  modified_base 8: mod_base = OTHER; note = 2'-O-methyluridine-3'-phosphate
  modified_base 9: mod_base = OTHER; note = 2'-deoxy-2'-fluorouridine-3'-phosphate
  modified_base 10: mod_base = OTHER; note = 2'-deoxy-2'-fluorouridine-3'-phosphate
  modified_base 11: mod_base = OTHER; note = 2'-deoxy-2'-fluorouridine-3'-phosphate
  modified_base 12: mod_base = OTHER; note = 2'-O-methylcytidine-3'-phosphate
  modified_base 13: mod_base = OTHER; note = 2'-O-methyladenosine-3'-phosphate
  modified_base 14: mod_base = OTHER; note = 2'-O-methyluridine-3'-phosphate
  modified_base 15: mod_base = OTHER; note = 2'-O-methylguanosine-3'-phosphate
  modified_base 16: mod_base = OTHER; note = 2'-O-methylcytidine-3'-phosphate
  modified_base 17: mod_base = OTHER; note = 2'-O-methyluridine-3'-phosphate
  modified_base 18: mod_base = OTHER; note = 2'-O-methylcytidine-3'-phosphate
  modified_base 19: mod_base = OTHER; note = 2'-O-methyluridine-3'-phosphate
  modified_base 20: mod_base = OTHER; note = 2'-O-methyluridine-3'-phosphate
  modified_base 21: mod_base = OTHER; note = 2'-O-methyladenosine
ttcaacattttcatgctctta

SEQ ID NO: 4338 - RNA, 21 nt, synthetic construct
  source 1..21: mol_type = other RNA
  modified_base 1: mod_base = OTHER; note = 2'-O-methyluridine-3'-phosphate
  modified_base 2: mod_base = OTHER; note = 2'-O-methylcytidine-3'-phosphate
  modified_base 3: mod_base = OTHER; note = 2'-O-methyladenosine-3'-phosphate
  modified_base 4: mod_base = OTHER; note = 2'-O-methyladenosine-3'-phosphate
  modified_base 5: mod_base = OTHER; note = 2'-O-methylcytidine-3'-phosphate
  modified_base 6: mod_base = OTHER; note = 2'-O-methyladenosine-3'-phosphate
  modified_base 7: mod_base = OTHER; note = 2'-deoxy-2'-fluorouridine-3'-phosphate
  modified_base 8: mod_base = OTHER; note = 2'-O-methyluridine-3'-phosphate
  modified_base 9: mod_base = OTHER; note = 2'-deoxy-2'-fluorouridine-3'-phosphate
  modified_base 10: mod_base = OTHER; note = 2'-deoxy-2'-fluorouridine-3'-phosphate
  modified_base 11: mod_base = OTHER; note = 2'-deoxy-2'-fluorocytidine-3'-phosphate
  modified_base 12: mod_base = OTHER; note = 2'-O-methyladenosine-3'-phosphate
  modified_base 13: mod_base = OTHER; note = 2'-O-methyluridine-3'-phosphate
  modified_base 14: mod_base = OTHER; note = 2'-O-methylguanosine-3'-phosphate
  modified_base 15: mod_base = OTHER; note = 2'-O-methylcytidine-3'-phosphate
  modified_base 16: mod_base = OTHER; note = 2'-O-methyluridine-3'-phosphate
  modified_base 17: mod_base = OTHER; note = 2'-O-methylcytidine-3'-phosphate
  modified_base 18: mod_base = OTHER; note = 2'-O-methyluridine-3'-phosphate
  modified_base 19: mod_base = OTHER; note = 2'-O-methyluridine-3'-phosphate
  modified_base 20: mod_base = OTHER; note = 2'-O-methyluridine-3'-phosphate
  modified_base 21: mod_base = OTHER; note = 2'-O-methyladenosine
tcaacattttcatgctcttta

SEQ ID NO: 4339 - RNA, 21 nt, synthetic construct
  source 1..21: mol_type = other RNA
  modified_base 1: mod_base = OTHER; note = 2'-O-methylcytidine-3'-phosphate
  modified_base 2: mod_base = OTHER; note = 2'-O-methyladenosine-3'-phosphate
  modified_base 3: mod_base = OTHER; note = 2'-O-methyladenosine-3'-phosphate
  modified_base 4: mod_base = OTHER; note = 2'-O-methylcytidine-3'-phosphate
  modified_base 5: mod_base = OTHER; note = 2'-O-methyladenosine-3'-phosphate
  modified_base 6: mod_base = OTHER; note = 2'-O-methyluridine-3'-phosphate
  modified_base 7: mod_base = OTHER; note = 2'-deoxy-2'-fluorouridine-3'-phosphate
  modified_base 8: mod_base = OTHER; note = 2'-O-methyluridine-3'-phosphate
  modified_base 9: mod_base = OTHER; note = 2'-deoxy-2'-fluorouridine-3'-phosphate
  modified_base 10: mod_base = OTHER; note = 2'-deoxy-2'-fluorocytidine-3'-phosphate
  modified_base 11: mod_base = OTHER; note = 2'-deoxy-2'-fluoroadenosine-3'-phosphate
  modified_base 12: mod_base = OTHER; note = 2'-O-methyluridine-3'-phosphate
  modified_base 13: mod_base = OTHER; note = 2'-O-methylguanosine-3'-phosphate
  modified_base 14: mod_base = OTHER; note = 2'-O-methylcytidine-3'-phosphate
  modified_base 15: mod_base = OTHER; note = 2'-O-methyluridine-3'-phosphate
  modified_base 16: mod_base = OTHER; note = 2'-O-methylcytidine-3'-phosphate
  modified_base 17: mod_base = OTHER; note = 2'-O-methyluridine-3'-phosphate
  modified_base 18: mod_base = OTHER; note = 2'-O-methyluridine-3'-phosphate
  modified_base 19: mod_base = OTHER; note = 2'-O-methyluridine-3'-phosphate
  modified_base 20: mod_base = OTHER; note = 2'-O-methylguanosine-3'-phosphate
  modified_base 21: mod_base = OTHER; note = 2'-O-methyladenosine
caacattttcatgctctttga

SEQ ID NO: 4340 - RNA, 21 nt, synthetic construct
  source 1..21: mol_type = other RNA
  modified_base 1: mod_base = OTHER; note = 2'-O-methyladenosine-3'-phosphate
  modified_base 2: mod_base = OTHER; note = 2'-O-methyladenosine-3'-phosphate
  modified_base 3: mod_base = OTHER; note = 2'-O-methylcytidine-3'-phosphate
  modified_base 4: mod_base = OTHER; note = 2'-O-methyladenosine-3'-phosphate
  modified_base 5: mod_base = OTHER; note = 2'-O-methyluridine-3'-phosphate
  modified_base 6: mod_base = OTHER; note = 2'-O-methyluridine-3'-phosphate
  modified_base 7: mod_base = OTHER; note = 2'-deoxy-2'-fluorouridine-3'-phosphate
  modified_base 8: mod_base = OTHER; note = 2'-O-methyluridine-3'-phosphate
  modified_base 9: mod_base = OTHER; note = 2'-deoxy-2'-fluorocytidine-3'-phosphate
  modified_base 10: mod_base = OTHER; note = 2'-deoxy-2'-fluoroadenosine-3'-phosphate
  modified_base 11: mod_base = OTHER; note = 2'-deoxy-2'-fluorouridine-3'-phosphate
  modified_base 12: mod_base = OTHER; note = 2'-O-methylguanosine-3'-phosphate
  modified_base 13: mod_base = OTHER; note = 2'-O-methylcytidine-3'-phosphate
  modified_base 14: mod_base = OTHER; note = 2'-O-methyluridine-3'-phosphate
  modified_base 15: mod_base = OTHER; note = 2'-O-methylcytidine-3'-phosphate
  modified_base 16: mod_base = OTHER; note = 2'-O-methyluridine-3'-phosphate
  modified_base 17: mod_base = OTHER; note = 2'-O-methyluridine-3'-phosphate
  modified_base 18: mod_base = OTHER; note = 2'-O-methyluridine-3'-phosphate
  modified_base 19: mod_base = OTHER; note = 2'-O-methylguanosine-3'-phosphate
  modified_base 20: mod_base = OTHER; note = 2'-O-methyluridine-3'-phosphate
  modified_base 21: mod_base = OTHER; note = 2'-O-methyladenosine
aacattttcatgctctttgta

SEQ ID NO: 4341 - RNA, 21 nt, synthetic construct
  source 1..21: mol_type = other RNA
  modified_base 1: mod_base = OTHER; note = 2'-O-methyladenosine-3'-phosphate
  modified_base 2: mod_base = OTHER; note = 2'-O-methylcytidine-3'-phosphate
  modified_base 3: mod_base = OTHER; note = 2'-O-methyladenosine-3'-phosphate
  modified_base 4: mod_base = OTHER; note = 2'-O-methyluridine-3'-phosphate
  modified_base 5: mod_base = OTHER; note = 2'-O-methyluridine-3'-phosphate
  modified_base 6: mod_base = OTHER; note = 2'-O-methyluridine-3'-phosphate
  modified_base 7: mod_base = OTHER; note = 2'-deoxy-2'-fluorouridine-3'-phosphate
  modified_base 8: mod_base = OTHER; note = 2'-O-methylcytidine-3'-phosphate
  modified_base 9: mod_base = OTHER; note = 2'-deoxy-2'-fluoroadenosine-3'-phosphate
  modified_base 10: mod_base = OTHER; note = 2'-deoxy-2'-fluorouridine-3'-phosphate
  modified_base 11: mod_base = OTHER; note = 2'-deoxy-2'-fluoroguanosine-3'-phosphate
  modified_base 12: mod_base = OTHER; note = 2'-O-methylcytidine-3'-phosphate
  modified_base 13: mod_base = OTHER; note = 2'-O-methyluridine-3'-phosphate
  modified_base 14: mod_base = OTHER; note = 2'-O-methylcytidine-3'-phosphate
  modified_base 15: mod_base = OTHER; note = 2'-O-methyluridine-3'-phosphate
  modified_base 16: mod_base = OTHER; note = 2'-O-methyluridine-3'-phosphate
  modified_base 17: mod_base = OTHER; note = 2'-O-methyluridine-3'-phosphate
  modified_base 18: mod_base = OTHER; note = 2'-O-methylguanosine-3'-phosphate
  modified_base 19: mod_base = OTHER; note = 2'-O-methyluridine-3'-phosphate
  modified_base 20: mod_base = OTHER; note = 2'-O-methyluridine-3'-phosphate
  modified_base 21: mod_base = OTHER; note = 2'-O-methyladenosine
acattttcatgctctttgtta

SEQ ID NO: 4342 - RNA, 21 nt, synthetic construct
  source 1..21: mol_type = other RNA
  modified_base 1: mod_base = OTHER; note = 2'-O-methylcytidine-3'-phosphate
  modified_base 2: mod_base = OTHER; note = 2'-O-methyladenosine-3'-phosphate
  modified_base 3: mod_base = OTHER; note = 2'-O-methyluridine-3'-phosphate
  modified_base 4: mod_base = OTHER; note = 2'-O-methyluridine-3'-phosphate
  modified_base 5: mod_base = OTHER; note = 2'-O-methyluridine-3'-phosphate
  modified_base 6: mod_base = OTHER; note = 2'-O-methyluridine-3'-phosphate
  modified_base 7: mod_base = OTHER; note = 2'-deoxy-2'-fluorocytidine-3'-phosphate
  modified_base 8: mod_base = OTHER; note = 2'-O-methyladenosine-3'-phosphate
  modified_base 9: mod_base = OTHER; note = 2'-deoxy-2'-fluorouridine-3'-phosphate
  modified_base 10: mod_base = OTHER; note = 2'-deoxy-2'-fluoroguanosine-3'-phosphate
  modified_base 11: mod_base = OTHER; note = 2'-deoxy-2'-fluorocytidine-3'-phosphate
  modified_base 12: mod_base = OTHER; note = 2'-O-methyluridine-3'-phosphate
  modified_base 13: mod_base = OTHER; note = 2'-O-methylcytidine-3'-phosphate
  modified_base 14: mod_base = OTHER; note = 2'-O-methyluridine-3'-phosphate
  modified_base 15: mod_base = OTHER; note = 2'-O-methyluridine-3'-phosphate
  modified_base 16: mod_base = OTHER; note = 2'-O-methyluridine-3'-phosphate
  modified_base 17: mod_base = OTHER; note = 2'-O-methylguanosine-3'-phosphate
  modified_base 18: mod_base = OTHER; note = 2'-O-methyluridine-3'-phosphate
  modified_base 19: mod_base = OTHER; note = 2'-O-methyluridine-3'-phosphate
  modified_base 20: mod_base = OTHER; note = 2'-O-methylcytidine-3'-phosphate
  modified_base 21: mod_base = OTHER; note = 2'-O-methyladenosine
cattttcatgctctttgttca

SEQ ID NO: 4343 - RNA, 21 nt, synthetic construct
  source 1..21: mol_type = other RNA
  modified_base 1: mod_base = OTHER; note = 2'-O-methyladenosine-3'-phosphate
  modified_base 2: mod_base = OTHER; note = 2'-O-methyluridine-3'-phosphate
  modified_base 3: mod_base = OTHER; note = 2'-O-methyluridine-3'-phosphate
  modified_base 4: mod_base = OTHER; note = 2'-O-methyluridine-3'-phosphate
  modified_base 5: mod_base = OTHER; note = 2'-O-methyluridine-3'-phosphate
  modified_base 6: mod_base = OTHER; note = 2'-O-methylcytidine-3'-phosphate
  modified_base 7: mod_base = OTHER; note = 2'-deoxy-2'-fluoroadenosine-3'-phosphate
  modified_base 8: mod_base = OTHER; note = 2'-O-methyluridine-3'-phosphate
  modified_base 9: mod_base = OTHER; note = 2'-deoxy-2'-fluoroguanosine-3'-phosphate
  modified_base 10: mod_base = OTHER; note = 2'-deoxy-2'-fluorocytidine-3'-phosphate
  modified_base 11: mod_base = OTHER; note = 2'-deoxy-2'-fluorouridine-3'-phosphate
  modified_base 12: mod_base = OTHER; note = 2'-O-methylcytidine-3'-phosphate
  modified_base 13: mod_base = OTHER; note = 2'-O-methyluridine-3'-phosphate
  modified_base 14: mod_base = OTHER; note = 2'-O-methyluridine-3'-phosphate
  modified_base 15: mod_base = OTHER; note = 2'-O-methyluridine-3'-phosphate
  modified_base 16: mod_base = OTHER; note = 2'-O-methylguanosine-3'-phosphate
  modified_base 17: mod_base = OTHER; note = 2'-O-methyluridine-3'-phosphate
  modified_base 18: mod_base = OTHER; note = 2'-O-methyluridine-3'-phosphate
  modified_base 19: mod_base = OTHER; note = 2'-O-methylcytidine-3'-phosphate
  modified_base 20: mod_base = OTHER; note = 2'-O-methyladenosine-3'-phosphate
  modified_base 21: mod_base = OTHER; note = 2'-O-methyladenosine
attttcatgctctttgttcaa

SEQ ID NO: 4344 - RNA, 21 nt, synthetic construct
  source 1..21: mol_type = other RNA
  modified_base 1: mod_base = OTHER; note = 2'-O-methyluridine-3'-phosphate
  modified_base 2: mod_base = OTHER; note = 2'-O-methyluridine-3'-phosphate
  modified_base 3: mod_base = OTHER; note = 2'-O-methyluridine-3'-phosphate
  modified_base 4: mod_base = OTHER; note = 2'-O-methyluridine-3'-phosphate
  modified_base 5: mod_base = OTHER; note = 2'-O-methylcytidine-3'-phosphate
  modified_base 6: mod_base = OTHER; note = 2'-O-methyladenosine-3'-phosphate
  modified_base 7: mod_base = OTHER; note = 2'-deoxy-2'-fluorouridine-3'-phosphate
  modified_base 8: mod_base = OTHER; note = 2'-O-methylguanosine-3'-phosphate
  modified_base 9: mod_base = OTHER; note = 2'-deoxy-2'-fluorocytidine-3'-phosphate
  modified_base 10: mod_base = OTHER; note = 2'-deoxy-2'-fluorouridine-3'-phosphate
  modified_base 11: mod_base = OTHER; note = 2'-deoxy-2'-fluorocytidine-3'-phosphate
  modified_base 12: mod_base = OTHER; note = 2'-O-methyluridine-3'-phosphate
  modified_base 13: mod_base = OTHER; note = 2'-O-methyluridine-3'-phosphate
  modified_base 14: mod_base = OTHER; note = 2'-O-methyluridine-3'-phosphate
  modified_base 15: mod_base = OTHER; note = 2'-O-methylguanosine-3'-phosphate
  modified_base 16: mod_base = OTHER; note = 2'-O-methyluridine-3'-phosphate
  modified_base 17: mod_base = OTHER; note = 2'-O-methyluridine-3'-phosphate
  modified_base 18: mod_base = OTHER; note = 2'-O-methylcytidine-3'-phosphate
  modified_base 19: mod_base = OTHER; note = 2'-O-methyladenosine-3'-phosphate
  modified_base 20: mod_base = OTHER; note = 2'-O-methylcytidine-3'-phosphate
  modified_base 21: mod_base = OTHER; note = 2'-O-methyladenosine
ttttcatgctctttgttcaca

SEQ ID NO: 4345 - RNA, 21 nt, synthetic construct
  source 1..21: mol_type = other RNA
  modified_base 1: mod_base = OTHER; note = 2'-O-methyluridine-3'-phosphate
  modified_base 2: mod_base = OTHER; note = 2'-O-methyluridine-3'-phosphate
  modified_base 3: mod_base = OTHER; note = 2'-O-methyluridine-3'-phosphate
  modified_base 4: mod_base = OTHER; note = 2'-O-methylcytidine-3'-phosphate
  modified_base 5: mod_base = OTHER; note = 2'-O-methyladenosine-3'-phosphate
  modified_base 6: mod_base = OTHER; note = 2'-O-methyluridine-3'-phosphate
  modified_base 7: mod_base = OTHER; note = 2'-deoxy-2'-fluoroguanosine-3'-phosphate
  modified_base 8: mod_base = OTHER; note = 2'-O-methylcytidine-3'-phosphate
  modified_base 9: mod_base = OTHER; note = 2'-deoxy-2'-fluorouridine-3'-phosphate
  modified_base 10: mod_base = OTHER; note = 2'-deoxy-2'-fluorocytidine-3'-phosphate
  modified_base 11: mod_base = OTHER; note = 2'-deoxy-2'-fluorouridine-3'-phosphate
  modified_base 12: mod_base = OTHER; note = 2'-O-methyluridine-3'-phosphate
  modified_base 13: mod_base = OTHER; note = 2'-O-methyluridine-3'-phosphate
  modified_base 14: mod_base = OTHER; note = 2'-O-methylguanosine-3'-phosphate
  modified_base 15: mod_base = OTHER; note = 2'-O-methyluridine-3'-phosphate
  modified_base 16: mod_base = OTHER; note = 2'-O-methyluridine-3'-phosphate
  modified_base 17: mod_base = OTHER; note = 2'-O-methylcytidine-3'-phosphate
  modified_base 18: mod_base = OTHER; note = 2'-O-methyladenosine-3'-phosphate
  modified_base 19: mod_base = OTHER; note = 2'-O-methylcytidine-3'-phosphate
  modified_base 20: mod_base = OTHER; note = 2'-O-methylcytidine-3'-phosphate
  modified_base 21: mod_base = OTHER; note = 2'-O-methyladenosine
tttcatgctctttgttcacca

SEQ ID NO: 4346 - RNA, 21 nt, synthetic construct
  source 1..21: mol_type = other RNA
  modified_base 1: mod_base = OTHER; note = 2'-O-methylguanosine-3'-phosphate
  modified_base 2: mod_base = OTHER; note = 2'-O-methyladenosine-3'-phosphate
  modified_base 3: mod_base = OTHER; note = 2'-O-methyluridine-3'-phosphate
  modified_base 4: mod_base = OTHER; note = 2'-O-methyluridine-3'-phosphate
  modified_base 5: mod_base = OTHER; note = 2'-O-methyluridine-3'-phosphate
  modified_base 6: mod_base = OTHER; note = 2'-O-methyladenosine-3'-phosphate
  modified_base 7: mod_base = OTHER; note = 2'-deoxy-2'-fluoroguanosine-3'-phosphate
  modified_base 8: mod_base = OTHER; note = 2'-O-methylcytidine-3'-phosphate
  modified_base 9: mod_base = OTHER; note = 2'-deoxy-2'-fluorouridine-3'-phosphate
  modified_base 10: mod_base = OTHER; note = 2'-deoxy-2'-fluoroguanosine-3'-phosphate
  modified_base 11: mod_base = OTHER; note = 2'-deoxy-2'-fluorocytidine-3'-phosphate
  modified_base 12: mod_base = OTHER; note = 2'-O-methyluridine-3'-phosphate
  modified_base 13: mod_base = OTHER; note = 2'-O-methyluridine-3'-phosphate
  modified_base 14: mod_base = OTHER; note = 2'-O-methyluridine-3'-phosphate
  modified_base 15: mod_base = OTHER; note = 2'-O-methyluridine-3'-phosphate
  modified_base 16: mod_base = OTHER; note = 2'-O-methylguanosine-3'-phosphate
  modified_base 17: mod_base = OTHER; note = 2'-O-methyladenosine-3'-phosphate
  modified_base 18: mod_base = OTHER; note = 2'-O-methyluridine-3'-phosphate
  modified_base 19: mod_base = OTHER; note = 2'-O-methyladenosine-3'-phosphate
  modified_base 20: mod_base = OTHER; note = 2'-O-methyladenosine-3'-phosphate
  modified_base 21: mod_base = OTHER; note = 2'-O-methyladenosine
gatttagctgcttttgataaa

SEQ ID NO: 4347 - RNA, 21 nt, synthetic construct
  source 1..21: mol_type = other RNA
  modified_base 1: mod_base = OTHER; note = 2'-O-methyladenosine-3'-phosphate
  modified_base 2: mod_base = OTHER; note = 2'-O-methyluridine-3'-phosphate
  modified_base 3: mod_base = OTHER; note = 2'-O-methyluridine-3'-phosphate
  modified_base 4: mod_base = OTHER; note = 2'-O-methyluridine-3'-phosphate
  modified_base 5: mod_base = OTHER; note = 2'-O-methyladenosine-3'-phosphate
  modified_base 6: mod_base = OTHER; note = 2'-O-methylguanosine-3'-phosphate
  modified_base 7: mod_base = OTHER; note = 2'-deoxy-2'-fluorocytidine-3'-phosphate
  modified_base 8: mod_base = OTHER; note = 2'-O-methyluridine-3'-phosphate
  modified_base 9: mod_base = OTHER; note = 2'-deoxy-2'-fluoroguanosine-3'-phosphate
  modified_base 10: mod_base = OTHER; note = 2'-deoxy-2'-fluorocytidine-3'-phosphate
  modified_base 11: mod_base = OTHER; note = 2'-deoxy-2'-fluorouridine-3'-phosphate
  modified_base 12: mod_base = OTHER; note = 2'-O-methyluridine-3'-phosphate
  modified_base 13: mod_base = OTHER; note = 2'-O-methyluridine-3'-phosphate
  modified_base 14: mod_base = OTHER; note = 2'-O-methyluridine-3'-phosphate
  modified_base 15: mod_base = OTHER; note = 2'-O-methylguanosine-3'-phosphate
  modified_base 16: mod_base = OTHER; note = 2'-O-methyladenosine-3'-phosphate
  modified_base 17: mod_base = OTHER; note = 2'-O-methyluridine-3'-phosphate
  modified_base 18: mod_base = OTHER; note = 2'-O-methyladenosine-3'-phosphate
  modified_base 19: mod_base = OTHER; note = 2'-O-methyladenosine-3'-phosphate
  modified_base 20: mod_base = OTHER; note = 2'-O-methylguanosine-3'-phosphate
  modified_base 21: mod_base = OTHER; note = 2'-O-methyladenosine
atttagctgcttttgataaga

SEQ ID NO: 4348 - RNA, 21 nt, synthetic construct
  source 1..21: mol_type = other RNA
  modified_base 1: mod_base = OTHER; note = 2'-O-methyluridine-3'-phosphate
  modified_base 2: mod_base = OTHER; note = 2'-O-methyluridine-3'-phosphate
  modified_base 3: mod_base = OTHER; note = 2'-O-methyladenosine-3'-phosphate
  modified_base 4: mod_base = OTHER; note = 2'-O-methylguanosine-3'-phosphate
  modified_base 5: mod_base = OTHER; note = 2'-O-methylcytidine-3'-phosphate
  modified_base 6: mod_base = OTHER; note = 2'-O-methyluridine-3'-phosphate
  modified_base 7: mod_base = OTHER; note = 2'-deoxy-2'-fluoroguanosine-3'-phosphate
  modified_base 8: mod_base = OTHER; note = 2'-O-methylcytidine-3'-phosphate
  modified_base 9: mod_base = OTHER; note = 2'-deoxy-2'-fluorouridine-3'-phosphate
  modified_base 10: mod_base = OTHER; note = 2'-deoxy-2'-fluorouridine-3'-phosphate
  modified_base 11: mod_base = OTHER; note = 2'-deoxy-2'-fluorouridine-3'-phosphate
  modified_base 12: mod_base = OTHER; note = 2'-O-methyluridine-3'-phosphate
  modified_base 13: mod_base = OTHER; note = 2'-O-methylguanosine-3'-phosphate
  modified_base 14: mod_base = OTHER; note = 2'-O-methyladenosine-3'-phosphate
  modified_base 15: mod_base = OTHER; note = 2'-O-methyluridine-3'-phosphate
  modified_base 16: mod_base = OTHER; note = 2'-O-methyladenosine-3'-phosphate
  modified_base 17: mod_base = OTHER; note = 2'-O-methyladenosine-3'-phosphate
  modified_base 18: mod_base = OTHER; note = 2'-O-methylguanosine-3'-phosphate
  modified_base 19: mod_base = OTHER; note = 2'-O-methylguanosine-3'-phosphate
  modified_base 20: mod_base = OTHER; note = 2'-O-methyladenosine-3'-phosphate
  modified_base 21: mod_base = OTHER; note = 2'-O-methyladenosine
ttagctgcttttgataaggaa

SEQ ID NO: 4349 - RNA, 21 nt, synthetic construct
  source 1..21: mol_type = other RNA
  modified_base 1: mod_base = OTHER; note = 2'-O-methyluridine-3'-phosphate
  modified_base 2: mod_base = OTHER; note = 2'-O-methyladenosine-3'-phosphate
  modified_base 3: mod_base = OTHER; note = 2'-O-methylguanosine-3'-phosphate
  modified_base 4: mod_base = OTHER; note = 2'-O-methylcytidine-3'-phosphate
  modified_base 5: mod_base = OTHER; note = 2'-O-methyluridine-3'-phosphate
  modified_base 6: mod_base = OTHER; note = 2'-O-methylguanosine-3'-phosphate
  modified_base 7: mod_base = OTHER; note = 2'-deoxy-2'-fluorocytidine-3'-phosphate
  modified_base 8: mod_base = OTHER; note = 2'-O-methyluridine-3'-phosphate
  modified_base 9: mod_base = OTHER; note = 2'-deoxy-2'-fluorouridine-3'-phosphate
  modified_base 10: mod_base = OTHER; note = 2'-deoxy-2'-fluorouridine-3'-phosphate
  modified_base 11: mod_base = OTHER; note = 2'-deoxy-2'-fluorouridine-3'-phosphate
  modified_base 12: mod_base = OTHER; note = 2'-O-methylguanosine-3'-phosphate
  modified_base 13: mod_base = OTHER; note = 2'-O-methyladenosine-3'-phosphate
  modified_base 14: mod_base = OTHER; note = 2'-O-methyluridine-3'-phosphate
  modified_base 15: mod_base = OTHER; note = 2'-O-methyladenosine-3'-phosphate
  modified_base 16: mod_base = OTHER; note = 2'-O-methyladenosine-3'-phosphate
  modified_base 17: mod_base = OTHER; note = 2'-O-methylguanosine-3'-phosphate
  modified_base 18: mod_base = OTHER; note = 2'-O-methylguanosine-3'-phosphate
  modified_base 19: mod_base = OTHER; note = 2'-O-methyladenosine-3'-phosphate
  modified_base 20: mod_base = OTHER; note = 2'-O-methyladenosine-3'-phosphate
  modified_base 21: mod_base = OTHER; note = 2'-O-methyladenosine
tagctgcttttgataaggaaa

SEQ ID NO: 4350 - RNA, 21 nt, synthetic construct
  source 1..21: mol_type = other RNA
  modified_base 1: mod_base = OTHER; note = 2'-O-methyladenosine-3'-phosphate
  modified_base 2: mod_base = OTHER; note = 2'-O-methylguanosine-3'-phosphate
  modified_base 3: mod_base = OTHER; note = 2'-O-methylcytidine-3'-phosphate
  modified_base 4: mod_base = OTHER; note = 2'-O-methyluridine-3'-phosphate
  modified_base 5: mod_base = OTHER; note = 2'-O-methylguanosine-3'-phosphate
  modified_base 6: mod_base = OTHER; note = 2'-O-methylcytidine-3'-phosphate
  modified_base 7: mod_base = OTHER; note = 2'-deoxy-2'-fluorouridine-3'-phosphate
  modified_base 8: mod_base = OTHER; note = 2'-O-methyluridine-3'-phosphate
  modified_base 9: mod_base = OTHER; note = 2'-deoxy-2'-fluorouridine-3'-phosphate
  modified_base 10: mod_base = OTHER; note = 2'-deoxy-2'-fluorouridine-3'-phosphate
  modified_base 11: mod_base = OTHER; note = 2'-deoxy-2'-fluoroguanosine-3'-phosphate
  modified_base 12: mod_base = OTHER; note = 2'-O-methyladenosine-3'-phosphate
  modified_base 13: mod_base = OTHER; note = 2'-O-methyluridine-3'-phosphate
  modified_base 14: mod_base = OTHER; note = 2'-O-methyladenosine-3'-phosphate
  modified_base 15: mod_base = OTHER; note = 2'-O-methyladenosine-3'-phosphate
  modified_base 16: mod_base = OTHER; note = 2'-O-methylguanosine-3'-phosphate
  modified_base 17: mod_base = OTHER; note = 2'-O-methylguanosine-3'-phosphate
  modified_base 18: mod_base = OTHER; note = 2'-O-methyladenosine-3'-phosphate
  modified_base 19: mod_base = OTHER; note = 2'-O-methyladenosine-3'-phosphate
  modified_base 20: mod_base = OTHER; note = 2'-O-methylcytidine-3'-phosphate
  modified_base 21: mod_base = OTHER; note = 2'-O-methyladenosine
agctgcttttgataaggaaca

SEQ ID NO: 4351 - RNA, 21 nt, synthetic construct
  source 1..21: mol_type = other RNA
  modified_base 1: mod_base = OTHER; note = 2'-O-methylguanosine-3'-phosphate
  modified_base 2: mod_base = OTHER; note = 2'-O-methylcytidine-3'-phosphate
  modified_base 3: mod_base = OTHER; note = 2'-O-methyluridine-3'-phosphate
  modified_base 4: mod_base = OTHER; note = 2'-O-methylguanosine-3'-phosphate
  modified_base 5: mod_base = OTHER; note = 2'-O-methylcytidine-3'-phosphate
  modified_base 6: mod_base = OTHER; note = 2'-O-methyluridine-3'-phosphate
  modified_base 7: mod_base = OTHER; note = 2'-deoxy-2'-fluorouridine-3'-phosphate
  modified_base 8: mod_base = OTHER; note = 2'-O-methyluridine-3'-phosphate
  modified_base 9: mod_base = OTHER; note = 2'-deoxy-2'-fluorouridine-3'-phosphate
  modified_base 10: mod_base = OTHER; note = 2'-deoxy-2'-fluoroguanosine-3'-phosphate
  modified_base 11: mod_base = OTHER; note = 2'-deoxy-2'-fluoroadenosine-3'-phosphate
  modified_base 12: mod_base = OTHER; note = 2'-O-methyluridine-3'-phosphate
  modified_base 13: mod_base = OTHER; note = 2'-O-methyladenosine-3'-phosphate
  modified_base 14: mod_base = OTHER; note = 2'-O-methyladenosine-3'-phosphate
  modified_base 15: mod_base = OTHER; note = 2'-O-methylguanosine-3'-phosphate
  modified_base 16: mod_base = OTHER; note = 2'-O-methylguanosine-3'-phosphate
  modified_base 17: mod_base = OTHER; note = 2'-O-methyladenosine-3'-phosphate
  modified_base 18: mod_base = OTHER; note = 2'-O-methyladenosine-3'-phosphate
  modified_base 19: mod_base = OTHER; note = 2'-O-methylcytidine-3'-phosphate
  modified_base 20: mod_base = OTHER; note = 2'-O-methyladenosine-3'-phosphate
  modified_base 21: mod_base = OTHER; note = 2'-O-methyladenosine
gctgcttttgataaggaacaa

SEQ ID NO: 4352 - RNA, 21 nt, synthetic construct
  source 1..21: mol_type = other RNA
  modified_base 1: mod_base = OTHER; note = 2'-O-methyladenosine-3'-phosphate
  modified_base 2: mod_base = OTHER; note = 2'-O-methyluridine-3'-phosphate
  modified_base 3: mod_base = OTHER; note = 2'-O-methyladenosine-3'-phosphate
  modified_base 4: mod_base = OTHER; note = 2'-O-methyladenosine-3'-phosphate
  modified_base 5: mod_base = OTHER; note = 2'-O-methylguanosine-3'-phosphate
  modified_base 6: mod_base = OTHER; note = 2'-O-methylguanosine-3'-phosphate
  modified_base 7: mod_base = OTHER; note = 2'-deoxy-2'-fluoroadenosine-3'-phosphate
  modified_base 8: mod_base = OTHER; note = 2'-O-methyladenosine-3'-phosphate
  modified_base 9: mod_base = OTHER; note = 2'-deoxy-2'-fluorocytidine-3'-phosphate
  modified_base 10: mod_base = OTHER; note = 2'-deoxy-2'-fluoroadenosine-3'-phosphate
  modified_base 11: mod_base = OTHER; note = 2'-deoxy-2'-fluoroguanosine-3'-phosphate
  modified_base 12: mod_base = OTHER; note = 2'-O-methylcytidine-3'-phosphate
  modified_base 13: mod_base = OTHER; note = 2'-O-methyluridine-3'-phosphate
  modified_base 14: mod_base = OTHER; note = 2'-O-methylguanosine-3'-phosphate
  modified_base 15: mod_base = OTHER; note = 2'-O-methylcytidine-3'-phosphate
  modified_base 16: mod_base = OTHER; note = 2'-O-methyladenosine-3'-phosphate
  modified_base 17: mod_base = OTHER; note = 2'-O-methylcytidine-3'-phosphate
  modified_base 18: mod_base = OTHER; note = 2'-O-methyladenosine-3'-phosphate
  modified_base 19: mod_base = OTHER; note = 2'-O-methyladenosine-3'-phosphate
  modified_base 20: mod_base = OTHER; note = 2'-O-methyladenosine-3'-phosphate
  modified_base 21: mod_base = OTHER; note = 2'-O-methyladenosine
ataaggaacagctgcacaaaa

SEQ ID NO: 4353 - RNA, 21 nt, synthetic construct
  source 1..21: mol_type = other RNA
  modified_base 1: mod_base = OTHER; note = 2'-O-methylcytidine-3'-phosphate
  modified_base 2: mod_base = OTHER; note = 2'-O-methylguanosine-3'-phosphate
  modified_base 3: mod_base = OTHER; note = 2'-O-methylcytidine-3'-phosphate
  modified_base 4: mod_base = OTHER; note = 2'-O-methyladenosine-3'-phosphate
  modified_base 5: mod_base = OTHER; note = 2'-O-methyluridine-3'-phosphate
  modified_base 6: mod_base = OTHER; note = 2'-O-methyluridine-3'-phosphate
  modified_base 7: mod_base = OTHER; note = 2'-deoxy-2'-fluorouridine-3'-phosphate
  modified_base 8: mod_base = OTHER; note = 2'-O-methyladenosine-3'-phosphate
  modified_base 9: mod_base = OTHER; note = 2'-deoxy-2'-fluorocytidine-3'-phosphate
  modified_base 10: mod_base = OTHER; note = 2'-deoxy-2'-fluorocytidine-3'-phosphate
  modified_base 11: mod_base = OTHER; note = 2'-deoxy-2'-fluorouridine-3'-phosphate
  modified_base 12: mod_base = OTHER; note = 2'-O-methylcytidine-3'-phosphate
  modified_base 13: mod_base = OTHER; note = 2'-O-methyladenosine-3'-phosphate
  modified_base 14: mod_base = OTHER; note = 2'-O-methyluridine-3'-phosphate
  modified_base 15: mod_base = OTHER; note = 2'-O-methylcytidine-3'-phosphate
  modified_base 16: mod_base = OTHER; note = 2'-O-methyladenosine-3'-phosphate
  modified_base 17: mod_base = OTHER; note = 2'-O-methylguanosine-3'-phosphate
  modified_base 18: mod_base = OTHER; note = 2'-O-methylcytidine-3'-phosphate
  modified_base 19: mod_base = OTHER; note = 2'-O-methyluridine-3'-phosphate
  modified_base 20: mod_base = OTHER; note = 2'-O-methyladenosine-3'-phosphate
  modified_base 21: mod_base = OTHER; note = 2'-O-methyladenosine
cgcatttacctcatcagctaa

SEQ ID NO: 4354 - RNA, 21 nt, synthetic construct
  source 1..21: mol_type = other RNA
  modified_base 1: mod_base = OTHER; note = 2'-O-methylguanosine-3'-phosphate
  modified_base 2: mod_base = OTHER; note = 2'-O-methylcytidine-3'-phosphate
  modified_base 3: mod_base = OTHER; note = 2'-O-methyladenosine-3'-phosphate
  modified_base 4: mod_base = OTHER; note = 2'-O-methyluridine-3'-phosphate
  modified_base 5: mod_base = OTHER; note = 2'-O-methyluridine-3'-phosphate
  modified_base 6: mod_base = OTHER; note = 2'-O-methyluridine-3'-phosphate
  modified_base 7: mod_base = OTHER; note = 2'-deoxy-2'-fluoroadenosine-3'-phosphate
  modified_base 8: mod_base = OTHER; note = 2'-O-methylcytidine-3'-phosphate
  modified_base 9: mod_base = OTHER; note = 2'-deoxy-2'-fluorocytidine-3'-phosphate
  modified_base 10: mod_base = OTHER; note = 2'-deoxy-2'-fluorouridine-3'-phosphate
  modified_base 11: mod_base = OTHER; note = 2'-deoxy-2'-fluorocytidine-3'-phosphate
  modified_base 12: mod_base = OTHER; note = 2'-O-methyladenosine-3'-phosphate
  modified_base 13: mod_base = OTHER; note = 2'-O-methyluridine-3'-phosphate
  modified_base 14: mod_base = OTHER; note = 2'-O-methylcytidine-3'-phosphate
  modified_base 15: mod_base = OTHER; note = 2'-O-methyladenosine-3'-phosphate
  modified_base 16: mod_base = OTHER; note = 2'-O-methylguanosine-3'-phosphate
  modified_base 17: mod_base = OTHER; note = 2'-O-methylcytidine-3'-phosphate
  modified_base 18: mod_base = OTHER; note = 2'-O-methyluridine-3'-phosphate
  modified_base 19: mod_base = OTHER; note = 2'-O-methyladenosine-3'-phosphate
  modified_base 20: mod_base = OTHER; note = 2'-O-methyladenosine-3'-phosphate
  modified_base 21: mod_base = OTHER; note = 2'-O-methyladenosine
gcatttacctcatcagctaaa

SEQ ID NO: 4355 - RNA, 21 nt, synthetic construct
  source 1..21: mol_type = other RNA
  modified_base 1: mod_base = OTHER; note = 2'-O-methylcytidine-3'-phosphate
  modified_base 2: mod_base = OTHER; note = 2'-O-methyladenosine-3'-phosphate
  modified_base 3: mod_base = OTHER; note = 2'-O-methyluridine-3'-phosphate
  modified_base 4: mod_base = OTHER; note = 2'-O-methyluridine-3'-phosphate
  modified_base 5: mod_base = OTHER; note = 2'-O-methyluridine-3'-phosphate
  modified_base 6: mod_base = OTHER; note = 2'-O-methyladenosine-3'-phosphate
  modified_base 7: mod_base = OTHER; note = 2'-deoxy-2'-fluorocytidine-3'-phosphate
  modified_base 8: mod_base = OTHER; note = 2'-O-methylcytidine-3'-phosphate
  modified_base 9: mod_base = OTHER; note = 2'-deoxy-2'-fluorouridine-3'-phosphate
  modified_base 10: mod_base = OTHER; note = 2'-deoxy-2'-fluorocytidine-3'-phosphate
  modified_base 11: mod_base = OTHER; note = 2'-deoxy-2'-fluoroadenosine-3'-phosphate
  modified_base 12: mod_base = OTHER; note = 2'-O-methyluridine-3'-phosphate
  modified_base 13: mod_base = OTHER; note = 2'-O-methylcytidine-3'-phosphate
  modified_base 14: mod_base = OTHER; note = 2'-O-methyladenosine-3'-phosphate
  modified_base 15: mod_base = OTHER; note = 2'-O-methylguanosine-3'-phosphate
  modified_base 16: mod_base = OTHER; note = 2'-O-methylcytidine-3'-phosphate
  modified_base 17: mod_base = OTHER; note = 2'-O-methyluridine-3'-phosphate
  modified_base 18: mod_base = OTHER; note = 2'-O-methyladenosine-3'-phosphate
  modified_base 19: mod_base = OTHER; note = 2'-O-methyladenosine-3'-phosphate
  modified_base 20: mod_base = OTHER; note = 2'-O-methylcytidine-3'-phosphate
  modified_base 21: mod_base = OTHER; note = 2'-O-methyladenosine
catttacctcatcagctaaca

SEQ ID NO: 4356 - RNA, 21 nt, synthetic construct
  source 1..21: mol_type = other RNA
  modified_base 1: mod_base = OTHER; note = 2'-O-methylguanosine-3'-phosphate
  modified_base 2: mod_base = OTHER; note = 2'-O-methylcytidine-3'-phosphate
  modified_base 3: mod_base = OTHER; note = 2'-O-methyluridine-3'-phosphate
  modified_base 4: mod_base = OTHER; note = 2'-O-methyluridine-3'-phosphate
  modified_base 5: mod_base = OTHER; note = 2'-O-methylguanosine-3'-phosphate
  modified_base 6: mod_base = OTHER; note = 2'-O-methyladenosine-3'-phosphate
  modified_base 7: mod_base = OTHER; note = 2'-deoxy-2'-fluorocytidine-3'-phosphate
  modified_base 8: mod_base = OTHER; note = 2'-O-methyladenosine-3'-phosphate
  modified_base 9: mod_base = OTHER; note = 2'-deoxy-2'-fluorouridine-3'-phosphate
  modified_base 10: mod_base = OTHER; note = 2'-deoxy-2'-fluoroguanosine-3'-phosphate
  modified_base 11: mod_base = OTHER; note = 2'-deoxy-2'-fluorocytidine-3'-phosphate
  modified_base 12: mod_base = OTHER; note = 2'-O-methyladenosine-3'-phosphate
  modified_base 13: mod_base = OTHER; note = 2'-O-methyluridine-3'-phosphate
  modified_base 14: mod_base = OTHER; note = 2'-O-methyluridine-3'-phosphate
  modified_base 15: mod_base = OTHER; note = 2'-O-methyluridine-3'-phosphate
  modified_base 16: mod_base = OTHER; note = 2'-O-methyluridine-3'-phosphate
  modified_base 17: mod_base = OTHER; note = 2'-O-methyluridine-3'-phosphate
  modified_base 18: mod_base = OTHER; note = 2'-O-methyladenosine-3'-phosphate
  modified_base 19: mod_base = OTHER; note = 2'-O-methylcytidine-3'-phosphate
  modified_base 20: mod_base = OTHER; note = 2'-O-methyluridine-3'-phosphate
  modified_base 21: mod_base = OTHER; note = 2'-O-methyladenosine
gcttgacatgcatttttacta

SEQ ID NO: 4357 - RNA, 21 nt, synthetic construct
  source 1..21: mol_type = other RNA
  modified_base 1: mod_base = OTHER; note = 2'-O-methylcytidine-3'-phosphate
  modified_base 2: mod_base = OTHER; note = 2'-O-methyluridine-3'-phosphate
  modified_base 3: mod_base = OTHER; note = 2'-O-methyluridine-3'-phosphate
  modified_base 4: mod_base = OTHER; note = 2'-O-methylguanosine-3'-phosphate
  modified_base 5: mod_base = OTHER; note = 2'-O-methyladenosine-3'-phosphate
  modified_base 6: mod_base = OTHER; note = 2'-O-methylcytidine-3'-phosphate
  modified_base 7: mod_base = OTHER; note = 2'-deoxy-2'-fluoroadenosine-3'-phosphate
  modified_base 8: mod_base = OTHER; note = 2'-O-methyluridine-3'-phosphate
  modified_base 9: mod_base = OTHER; note = 2'-deoxy-2'-fluoroguanosine-3'-phosphate
  modified_base 10: mod_base = OTHER; note = 2'-deoxy-2'-fluorocytidine-3'-phosphate
  modified_base 11: mod_base = OTHER; note = 2'-deoxy-2'-fluoroadenosine-3'-phosphate
  modified_base 12: mod_base = OTHER; note = 2'-O-methyluridine-3'-phosphate
  modified_base 13: mod_base = OTHER; note = 2'-O-methyluridine-3'-phosphate
  modified_base 14: mod_base = OTHER; note = 2'-O-methyluridine-3'-phosphate
  modified_base 15: mod_base = OTHER; note = 2'-O-methyluridine-3'-phosphate
  modified_base 16: mod_base = OTHER; note = 2'-O-methyluridine-3'-phosphate
  modified_base 17: mod_base = OTHER; note = 2'-O-methyladenosine-3'-phosphate
  modified_base 18: mod_base = OTHER; note = 2'-O-methylcytidine-3'-phosphate
  modified_base 19: mod_base = OTHER; note = 2'-O-methyluridine-3'-phosphate
  modified_base 20: mod_base = OTHER; note = 2'-O-methylguanosine-3'-phosphate
  modified_base 21: mod_base = OTHER; note = 2'-O-methyladenosine
cttgacatgcatttttactga

SEQ ID NO: 4358 - RNA, 21 nt, synthetic construct
  source 1..21: mol_type = other RNA
  modified_base 1: mod_base = OTHER; note = 2'-O-methyluridine-3'-phosphate
  modified_base 2: mod_base = OTHER; note = 2'-O-methyluridine-3'-phosphate
  modified_base 3: mod_base = OTHER; note = 2'-O-methylguanosine-3'-phosphate
  modified_base 4: mod_base = OTHER; note = 2'-O-methyladenosine-3'-phosphate
  modified_base 5: mod_base = OTHER; note = 2'-O-methylcytidine-3'-phosphate
  modified_base 6: mod_base = OTHER; note = 2'-O-methyladenosine-3'-phosphate
  modified_base 7: mod_base = OTHER; note = 2'-deoxy-2'-fluorouridine-3'-phosphate
  modified_base 8: mod_base = OTHER; note = 2'-O-methylguanosine-3'-phosphate
  modified_base 9: mod_base = OTHER; note = 2'-deoxy-2'-fluorocytidine-3'-phosphate
  modified_base 10: mod_base = OTHER; note = 2'-deoxy-2'-fluoroadenosine-3'-phosphate
  modified_base 11: mod_base = OTHER; note = 2'-deoxy-2'-fluorouridine-3'-phosphate
  modified_base 12: mod_base = OTHER; note = 2'-O-methyluridine-3'-phosphate
  modified_base 13: mod_base = OTHER; note = 2'-O-methyluridine-3'-phosphate
  modified_base 14: mod_base = OTHER; note = 2'-O-methyluridine-3'-phosphate
  modified_base 15: mod_base = OTHER; note = 2'-O-methyluridine-3'-phosphate
  modified_base 16: mod_base = OTHER; note = 2'-O-methyladenosine-3'-phosphate
  modified_base 17: mod_base = OTHER; note = 2'-O-methylcytidine-3'-phosphate
  modified_base 18: mod_base = OTHER; note = 2'-O-methyluridine-3'-phosphate
  modified_base 19: mod_base = OTHER; note = 2'-O-methylguanosine-3'-phosphate
  modified_base 20: mod_base = OTHER; note = 2'-O-methyluridine-3'-phosphate
  modified_base 21: mod_base = OTHER; note = 2'-O-methyladenosine
ttgacatgcatttttactgta

SEQ ID NO: 4359 - RNA, 21 nt, synthetic construct
  source 1..21: mol_type = other RNA
  modified_base 1: mod_base = OTHER; note = 2'-O-methyluridine-3'-phosphate
  modified_base 2: mod_base = OTHER; note = 2'-O-methylguanosine-3'-phosphate
  modified_base 3: mod_base = OTHER; note = 2'-O-methyladenosine-3'-phosphate
  modified_base 4: mod_base = OTHER; note = 2'-O-methylcytidine-3'-phosphate
  modified_base 5: mod_base = OTHER; note = 2'-O-methyladenosine-3'-phosphate
  modified_base 6: mod_base = OTHER; note = 2'-O-methyluridine-3'-phosphate
  modified_base 7: mod_base = OTHER; note = 2'-deoxy-2'-fluoroguanosine-3'-phosphate
  modified_base 8: mod_base = OTHER; note = 2'-O-methylcytidine-3'-phosphate
  modified_base 9: mod_base = OTHER; note = 2'-deoxy-2'-fluoroadenosine-3'-phosphate
  modified_base 10: mod_base = OTHER; note = 2'-deoxy-2'-fluorouridine-3'-phosphate
  modified_base 11: mod_base = OTHER; note = 2'-deoxy-2'-fluorouridine-3'-phosphate
  modified_base 12: mod_base = OTHER; note = 2'-O-methyluridine-3'-phosphate
  modified_base 13: mod_base = OTHER; note = 2'-O-methyluridine-3'-phosphate
  modified_base 14: mod_base = OTHER; note = 2'-O-methyluridine-3'-phosphate
  modified_base 15: mod_base = OTHER; note = 2'-O-methyladenosine-3'-phosphate
  modified_base 16: mod_base = OTHER; note = 2'-O-methylcytidine-3'-phosphate
  modified_base 17: mod_base = OTHER; note = 2'-O-methyluridine-3'-phosphate
  modified_base 18: mod_base = OTHER; note = 2'-O-methylguanosine-3'-phosphate
  modified_base 19: mod_base = OTHER; note = 2'-O-methyluridine-3'-phosphate
  modified_base 20: mod_base = OTHER; note = 2'-O-methylcytidine-3'-phosphate
  modified_base 21: mod_base = OTHER; note = 2'-O-methyladenosine
tgacatgcatttttactgtca

SEQ ID NO: 4360 - RNA, 21 nt, synthetic construct
  source 1..21: mol_type = other RNA
  modified_base 1: mod_base = OTHER; note = 2'-O-methylguanosine-3'-phosphate
  modified_base 2: mod_base = OTHER; note = 2'-O-methyladenosine-3'-phosphate
  modified_base 3: mod_base = OTHER; note = 2'-O-methylcytidine-3'-phosphate
  modified_base 4: mod_base = OTHER; note = 2'-O-methyladenosine-3'-phosphate
  modified_base 5: mod_base = OTHER; note = 2'-O-methyluridine-3'-phosphate
  modified_base 6: mod_base = OTHER; note = 2'-O-methylguanosine-3'-phosphate
  modified_base 7: mod_base = OTHER; note = 2'-deoxy-2'-fluorocytidine-3'-phosphate
  modified_base 8: mod_base = OTHER; note = 2'-O-methyladenosine-3'-phosphate
  modified_base 9: mod_base = OTHER; note = 2'-deoxy-2'-fluorouridine-3'-phosphate
  modified_base 10: mod_base = OTHER; note = 2'-deoxy-2'-fluorouridine-3'-phosphate
  modified_base 11: mod_base = OTHER; note = 2'-deoxy-2'-fluorouridine-3'-phosphate
  modified_base 12: mod_base = OTHER; note = 2'-O-methyluridine-3'-phosphate
  modified_base 13: mod_base = OTHER; note = 2'-O-methyluridine-3'-phosphate
  modified_base 14: mod_base = OTHER; note = 2'-O-methyladenosine-3'-phosphate
  modified_base 15: mod_base = OTHER; note = 2'-O-methylcytidine-3'-phosphate
  modified_base 16: mod_base = OTHER; note = 2'-O-methyluridine-3'-phosphate
  modified_base 17: mod_base = OTHER; note = 2'-O-methylguanosine-3'-phosphate
  modified_base 18: mod_base = OTHER; note = 2'-O-methyluridine-3'-phosphate
  modified_base 19: mod_base = OTHER; note = 2'-O-methylcytidine-3'-phosphate
  modified_base 20: mod_base = OTHER; note = 2'-O-methyluridine-3'-phosphate
  modified_base 21: mod_base = OTHER; note = 2'-O-methyladenosine
gacatgcatttttactgtcta

SEQ ID NO: 4361 - RNA, 21 nt, synthetic construct
  source 1..21: mol_type = other RNA
  modified_base 1: mod_base = OTHER; note = 2'-O-methyladenosine-3'-phosphate
  modified_base 2: mod_base = OTHER; note = 2'-O-methylcytidine-3'-phosphate
  modified_base 3: mod_base = OTHER; note = 2'-O-methyladenosine-3'-phosphate
  modified_base 4: mod_base = OTHER; note = 2'-O-methyluridine-3'-phosphate
  modified_base 5: mod_base = OTHER; note = 2'-O-methylguanosine-3'-phosphate
  modified_base 6: mod_base = OTHER; note = 2'-O-methylcytidine-3'-phosphate
  modified_base 7: mod_base = OTHER; note = 2'-deoxy-2'-fluoroadenosine-3'-phosphate
  modified_base 8: mod_base = OTHER; note = 2'-O-methyluridine-3'-phosphate
  modified_base 9: mod_base = OTHER; note = 2'-deoxy-2'-fluorouridine-3'-phosphate
  modified_base 10: mod_base = OTHER; note = 2'-deoxy-2'-fluorouridine-3'-phosphate
  modified_base 11: mod_base = OTHER; note = 2'-deoxy-2'-fluorouridine-3'-phosphate
  modified_base 12: mod_base = OTHER; note = 2'-O-methyluridine-3'-phosphate
  modified_base 13: mod_base = OTHER; note = 2'-O-methyladenosine-3'-phosphate
  modified_base 14: mod_base = OTHER; note = 2'-O-methylcytidine-3'-phosphate
  modified_base 15: mod_base = OTHER; note = 2'-O-methyluridine-3'-phosphate
  modified_base 16: mod_base = OTHER; note = 2'-O-methylguanosine-3'-phosphate
  modified_base 17: mod_base = OTHER; note = 2'-O-methyluridine-3'-phosphate
  modified_base 18: mod_base = OTHER; note = 2'-O-methylcytidine-3'-phosphate
  modified_base 19: mod_base = OTHER; note = 2'-O-methyluridine-3'-phosphate
  modified_base 20: mod_base = OTHER; note = 2'-O-methyluridine-3'-phosphate
  modified_base 21: mod_base = OTHER; note = 2'-O-methyladenosine
acatgcatttttactgtctta

SEQ ID NO: 4362 - RNA, 21 nt, synthetic construct
  source 1..21: mol_type = other RNA
  modified_base 1: mod_base = OTHER; note = 2'-O-methylcytidine-3'-phosphate
  modified_base 2: mod_base = OTHER; note = 2'-O-methyladenosine-3'-phosphate
  modified_base 3: mod_base = OTHER; note = 2'-O-methyluridine-3'-phosphate
  modified_base 4: mod_base = OTHER; note = 2'-O-methylguanosine-3'-phosphate
  modified_base 5: mod_base = OTHER; note = 2'-O-methylcytidine-3'-phosphate
  modified_base 6: mod_base = OTHER; note = 2'-O-methyladenosine-3'-phosphate
  modified_base 7: mod_base = OTHER; note = 2'-deoxy-2'-fluorouridine-3'-phosphate
  modified_base 8: mod_base = OTHER; note = 2'-O-methyluridine-3'-phosphate
  modified_base 9: mod_base = OTHER; note = 2'-deoxy-2'-fluorouridine-3'-phosphate
  modified_base 10: mod_base = OTHER; note = 2'-deoxy-2'-fluorouridine-3'-phosphate
  modified_base 11: mod_base = OTHER; note = 2'-deoxy-2'-fluorouridine-3'-phosphate
  modified_base 12: mod_base = OTHER; note = 2'-O-methyladenosine-3'-phosphate
  modified_base 13: mod_base = OTHER; note = 2'-O-methylcytidine-3'-phosphate
  modified_base 14: mod_base = OTHER; note = 2'-O-methyluridine-3'-phosphate
  modified_base 15: mod_base = OTHER; note = 2'-O-methylguanosine-3'-phosphate
  modified_base 16: mod_base = OTHER; note = 2'-O-methyluridine-3'-phosphate
  modified_base 17: mod_base = OTHER; note = 2'-O-methylcytidine-3'-phosphate
  modified_base 18: mod_base = OTHER; note = 2'-O-methyluridine-3'-phosphate
  modified_base 19: mod_base = OTHER; note = 2'-O-methyluridine-3'-phosphate
  modified_base 20: mod_base = OTHER; note = 2'-O-methyluridine-3'-phosphate
  modified_base 21: mod_base = OTHER; note = 2'-O-methyladenosine
catgcatttttactgtcttta

SEQ ID NO: 4363 - RNA, 21 nt, synthetic construct
  source 1..21: mol_type = other RNA
  modified_base 1: mod_base = OTHER; note = 2'-O-methyladenosine-3'-phosphate
  modified_base 2: mod_base = OTHER; note = 2'-O-methyluridine-3'-phosphate
  modified_base 3: mod_base = OTHER; note = 2'-O-methylguanosine-3'-phosphate
  modified_base 4: mod_base = OTHER; note = 2'-O-methylcytidine-3'-phosphate
  modified_base 5: mod_base = OTHER; note = 2'-O-methyladenosine-3'-phosphate
  modified_base 6: mod_base = OTHER; note = 2'-O-methyluridine-3'-phosphate
  modified_base 7: mod_base = OTHER; note = 2'-deoxy-2'-fluorouridine-3'-phosphate
  modified_base 8: mod_base = OTHER; note = 2'-O-methyluridine-3'-phosphate
  modified_base 9: mod_base = OTHER; note = 2'-deoxy-2'-fluorouridine-3'-phosphate
  modified_base 10: mod_base = OTHER; note = 2'-deoxy-2'-fluorouridine-3'-phosphate
  modified_base 11: mod_base = OTHER; note = 2'-deoxy-2'-fluoroadenosine-3'-phosphate
  modified_base 12: mod_base = OTHER; note = 2'-O-methylcytidine-3'-phosphate
  modified_base 13: mod_base = OTHER; note = 2'-O-methyluridine-3'-phosphate
  modified_base 14: mod_base = OTHER; note = 2'-O-methylguanosine-3'-phosphate
  modified_base 15: mod_base = OTHER; note = 2'-O-methyluridine-3'-phosphate
  modified_base 16: mod_base = OTHER; note = 2'-O-methylcytidine-3'-phosphate
  modified_base 17: mod_base = OTHER; note = 2'-O-methyluridine-3'-phosphate
  modified_base 18: mod_base = OTHER; note = 2'-O-methyluridine-3'-phosphate
  modified_base 19: mod_base = OTHER; note = 2'-O-methyluridine-3'-phosphate
  modified_base 20: mod_base = OTHER; note = 2'-O-methyladenosine-3'-phosphate
  modified_base 21: mod_base = OTHER; note = 2'-O-methyladenosine
atgcatttttactgtctttaa

SEQ ID NO: 4364 - RNA, 21 nt, synthetic construct
  source 1..21: mol_type = other RNA
  modified_base 1: mod_base = OTHER; note = 2'-O-methyluridine-3'-phosphate
  modified_base 2: mod_base = OTHER; note = 2'-O-methylguanosine-3'-phosphate
  modified_base 3: mod_base = OTHER; note = 2'-O-methylcytidine-3'-phosphate
  modified_base 4: mod_base = OTHER; note = 2'-O-methyladenosine-3'-phosphate
  modified_base 5: mod_base = OTHER; note = 2'-O-methyluridine-3'-phosphate
  modified_base 6: mod_base = OTHER; note = 2'-O-methyluridine-3'-phosphate
  modified_base 7: mod_base = OTHER; note = 2'-deoxy-2'-fluorouridine-3'-phosphate
  modified_base 8: mod_base = OTHER; note = 2'-O-methyluridine-3'-phosphate
  modified_base 9: mod_base = OTHER; note = 2'-deoxy-2'-fluorouridine-3'-phosphate
  modified_base 10: mod_base = OTHER; note = 2'-deoxy-2'-fluoroadenosine-3'-phosphate
  modified_base 11: mod_base = OTHER; note = 2'-deoxy-2'-fluorocytidine-3'-phosphate
  modified_base 12: mod_base = OTHER; note = 2'-O-methyluridine-3'-phosphate
  modified_base 13: mod_base = OTHER; note = 2'-O-methylguanosine-3'-phosphate
  modified_base 14: mod_base = OTHER; note = 2'-O-methyluridine-3'-phosphate
  modified_base 15: mod_base = OTHER; note = 2'-O-methylcytidine-3'-phosphate
  modified_base 16: mod_base = OTHER; note = 2'-O-methyluridine-3'-phosphate
  modified_base 17: mod_base = OTHER; note = 2'-O-methyluridine-3'-phosphate
  modified_base 18: mod_base = OTHER; note = 2'-O-methyluridine-3'-phosphate
  modified_base 19: mod_base = OTHER; note = 2'-O-methyladenosine-3'-phosphate
  modified_base 20: mod_base = OTHER; note = 2'-O-methyluridine-3'-phosphate
  modified_base 21: mod_base = OTHER; note = 2'-O-methyladenosine
tgcatttttactgtctttata

SEQ ID NO: 4365 - RNA, 21 nt, synthetic construct
  source 1..21: mol_type = other RNA
  modified_base 1: mod_base = OTHER; note = 2'-O-methylguanosine-3'-phosphate
  modified_base 2: mod_base = OTHER; note = 2'-O-methylcytidine-3'-phosphate
  modified_base 3: mod_base = OTHER; note = 2'-O-methyladenosine-3'-phosphate
  modified_base 4: mod_base = OTHER; note = 2'-O-methyluridine-3'-phosphate
  modified_base 5: mod_base = OTHER; note = 2'-O-methyluridine-3'-phosphate
  modified_base 6: mod_base = OTHER; note = 2'-O-methyluridine-3'-phosphate
  modified_base 7: mod_base = OTHER; note = 2'-deoxy-2'-fluorouridine-3'-phosphate
  modified_base 8: mod_base = OTHER; note = 2'-O-methyluridine-3'-phosphate
  modified_base 9: mod_base = OTHER; note = 2'-deoxy-2'-fluoroadenosine-3'-phosphate
  modified_base 10: mod_base = OTHER; note = 2'-deoxy-2'-fluorocytidine-3'-phosphate
  modified_base 11: mod_base = OTHER; note = 2'-deoxy-2'-fluorouridine-3'-phosphate
  modified_base 12: mod_base = OTHER; note = 2'-O-methylguanosine-3'-phosphate
  modified_base 13: mod_base = OTHER; note = 2'-O-methyluridine-3'-phosphate
  modified_base 14: mod_base = OTHER; note = 2'-O-methylcytidine-3'-phosphate
  modified_base 15: mod_base = OTHER; note = 2'-O-methyluridine-3'-phosphate
  modified_base 16: mod_base = OTHER; note = 2'-O-methyluridine-3'-phosphate
  modified_base 17: mod_base = OTHER; note = 2'-O-methyluridine-3'-phosphate
  modified_base 18: mod_base = OTHER; note = 2'-O-methyladenosine-3'-phosphate
  modified_base 19: mod_base = OTHER; note = 2'-O-methyluridine-3'-phosphate
  modified_base 20: mod_base = OTHER; note = 2'-O-methyluridine-3'-phosphate
  modified_base 21: mod_base = OTHER; note = 2'-O-methyladenosine
gcatttttactgtctttatta

SEQ ID NO: 4366 - RNA, 21 nt, synthetic construct
  source 1..21: mol_type = other RNA
  modified_base 1: mod_base = OTHER; note = 2'-O-methylcytidine-3'-phosphate
  modified_base 2: mod_base = OTHER; note = 2'-O-methyladenosine-3'-phosphate
  modified_base 3: mod_base = OTHER; note = 2'-O-methyluridine-3'-phosphate
  modified_base 4: mod_base = OTHER; note = 2'-O-methyluridine-3'-phosphate
  modified_base 5: mod_base = OTHER; note = 2'-O-methyluridine-3'-phosphate
  modified_base 6: mod_base = OTHER; note = 2'-O-methyluridine-3'-phosphate
  modified_base 7: mod_base = OTHER; note = 2'-deoxy-2'-fluorouridine-3'-phosphate
  modified_base 8: mod_base = OTHER; note = 2'-O-methyladenosine-3'-phosphate
  modified_base 9: mod_base = OTHER; note = 2'-deoxy-2'-fluorocytidine-3'-phosphate
  modified_base 10: mod_base = OTHER; note = 2'-deoxy-2'-fluorouridine-3'-phosphate
  modified_base 11: mod_base = OTHER; note = 2'-deoxy-2'-fluoroguanosine-3'-phosphate
  modified_base 12: mod_base = OTHER; note = 2'-O-methyluridine-3'-phosphate
  modified_base 13: mod_base = OTHER; note = 2'-O-methylcytidine-3'-phosphate
  modified_base 14: mod_base = OTHER; note = 2'-O-methyluridine-3'-phosphate
  modified_base 15: mod_base = OTHER; note = 2'-O-methyluridine-3'-phosphate
  modified_base 16: mod_base = OTHER; note = 2'-O-methyluridine-3'-phosphate
  modified_base 17: mod_base = OTHER; note = 2'-O-methyladenosine-3'-phosphate
  modified_base 18: mod_base = OTHER; note = 2'-O-methyluridine-3'-phosphate
  modified_base 19: mod_base = OTHER; note = 2'-O-methyluridine-3'-phosphate
  modified_base 20: mod_base = OTHER; note = 2'-O-methylcytidine-3'-phosphate
  modified_base 21: mod_base = OTHER; note = 2'-O-methyladenosine
catttttactgtctttattca

SEQ ID NO: 4367 - RNA, 21 nt, synthetic construct
  source 1..21: mol_type = other RNA
  modified_base 1: mod_base = OTHER; note = 2'-O-methyladenosine-3'-phosphate
  modified_base 2: mod_base = OTHER; note = 2'-O-methyluridine-3'-phosphate
  modified_base 3: mod_base = OTHER; note = 2'-O-methyluridine-3'-phosphate
  modified_base 4: mod_base = OTHER; note = 2'-O-methyluridine-3'-phosphate
  modified_base 5: mod_base = OTHER; note = 2'-O-methyluridine-3'-phosphate
  modified_base 6: mod_base = OTHER; note = 2'-O-methyluridine-3'-phosphate
  modified_base 7: mod_base = OTHER; note = 2'-deoxy-2'-fluoroadenosine-3'-phosphate
  modified_base 8: mod_base = OTHER; note = 2'-O-methylcytidine-3'-phosphate
  modified_base 9: mod_base = OTHER; note = 2'-deoxy-2'-fluorouridine-3'-phosphate
  modified_base 10: mod_base = OTHER; note = 2'-deoxy-2'-fluoroguanosine-3'-phosphate
  modified_base 11: mod_base = OTHER; note = 2'-deoxy-2'-fluorouridine-3'-phosphate
  modified_base 12: mod_base = OTHER; note = 2'-O-methylcytidine-3'-phosphate
  modified_base 13: mod_base = OTHER; note = 2'-O-methyluridine-3'-phosphate
  modified_base 14: mod_base = OTHER; note = 2'-O-methyluridine-3'-phosphate
  modified_base 15: mod_base = OTHER; note = 2'-O-methyluridine-3'-phosphate
  modified_base 16: mod_base = OTHER; note = 2'-O-methyladenosine-3'-phosphate
  modified_base 17: mod_base = OTHER; note = 2'-O-methyluridine-3'-phosphate
  modified_base 18: mod_base = OTHER; note = 2'-O-methyluridine-3'-phosphate
  modified_base 19: mod_base = OTHER; note = 2'-O-methylcytidine-3'-phosphate
  modified_base 20: mod_base = OTHER; note = 2'-O-methylcytidine-3'-phosphate
  modified_base 21: mod_base = OTHER; note = 2'-O-methyladenosine
atttttactgtctttattcca

SEQ ID NO: 4368 - RNA, 21 nt, synthetic construct
  source 1..21: mol_type = other RNA
  modified_base 1: mod_base = OTHER; note = 2'-O-methyluridine-3'-phosphate
  modified_base 2: mod_base = OTHER; note = 2'-O-methyluridine-3'-phosphate
  modified_base 3: mod_base = OTHER; note = 2'-O-methyluridine-3'-phosphate
  modified_base 4: mod_base = OTHER; note = 2'-O-methyluridine-3'-phosphate
  modified_base 5: mod_base = OTHER; note = 2'-O-methyluridine-3'-phosphate
  modified_base 6: mod_base = OTHER; note = 2'-O-methyladenosine-3'-phosphate
  modified_base 7: mod_base = OTHER; note = 2'-deoxy-2'-fluorocytidine-3'-phosphate
  modified_base 8: mod_base = OTHER; note = 2'-O-methyluridine-3'-phosphate
  modified_base 9: mod_base = OTHER; note = 2'-deoxy-2'-fluoroguanosine-3'-phosphate
  modified_base 10: mod_base = OTHER; note = 2'-deoxy-2'-fluorouridine-3'-phosphate
  modified_base 11: mod_base = OTHER; note = 2'-deoxy-2'-fluorocytidine-3'-phosphate
  modified_base 12: mod_base = OTHER; note = 2'-O-methyluridine-3'-phosphate
  modified_base 13: mod_base = OTHER; note = 2'-O-methyluridine-3'-phosphate
  modified_base 14: mod_base = OTHER; note = 2'-O-methyluridine-3'-phosphate
  modified_base 15: mod_base = OTHER; note = 2'-O-methyladenosine-3'-phosphate
  modified_base 16: mod_base = OTHER; note = 2'-O-methyluridine-3'-phosphate
  modified_base 17: mod_base = OTHER; note = 2'-O-methyluridine-3'-phosphate
  modified_base 18: mod_base = OTHER; note = 2'-O-methylcytidine-3'-phosphate
  modified_base 19: mod_base = OTHER; note = 2'-O-methylcytidine-3'-phosphate
  modified_base 20: mod_base = OTHER; note = 2'-O-methyluridine-3'-phosphate
  modified_base 21: mod_base = OTHER; note = 2'-O-methyladenosine
tttttactgtctttattccta

SEQ ID NO: 4369 - RNA, 21 nt, synthetic construct
  source 1..21: mol_type = other RNA
  modified_base 1: mod_base = OTHER; note = 2'-O-methyluridine-3'-phosphate
  modified_base 2: mod_base = OTHER; note = 2'-O-methyluridine-3'-phosphate
  modified_base 3: mod_base = OTHER; note = 2'-O-methyluridine-3'-phosphate
  modified_base 4: mod_base = OTHER; note = 2'-O-methyluridine-3'-phosphate
  modified_base 5: mod_base = OTHER; note = 2'-O-methyladenosine-3'-phosphate
  modified_base 6: mod_base = OTHER; note = 2'-O-methylcytidine-3'-phosphate
  modified_base 7: mod_base = OTHER; note = 2'-deoxy-2'-fluorouridine-3'-phosphate
  modified_base 8: mod_base = OTHER; note = 2'-O-methylguanosine-3'-phosphate
  modified_base 9: mod_base = OTHER; note = 2'-deoxy-2'-fluorouridine-3'-phosphate
  modified_base 10: mod_base = OTHER; note = 2'-deoxy-2'-fluorocytidine-3'-phosphate
  modified_base 11: mod_base = OTHER; note = 2'-deoxy-2'-fluorouridine-3'-phosphate
  modified_base 12: mod_base = OTHER; note = 2'-O-methyluridine-3'-phosphate
  modified_base 13: mod_base = OTHER; note = 2'-O-methyluridine-3'-phosphate
  modified_base 14: mod_base = OTHER; note = 2'-O-methyladenosine-3'-phosphate
  modified_base 15: mod_base = OTHER; note = 2'-O-methyluridine-3'-phosphate
  modified_base 16: mod_base = OTHER; note = 2'-O-methyluridine-3'-phosphate
  modified_base 17: mod_base = OTHER; note = 2'-O-methylcytidine-3'-phosphate
  modified_base 18: mod_base = OTHER; note = 2'-O-methylcytidine-3'-phosphate
  modified_base 19: mod_base = OTHER; note = 2'-O-methyluridine-3'-phosphate
  modified_base 20: mod_base = OTHER; note = 2'-O-methylguanosine-3'-phosphate
  modified_base 21: mod_base = OTHER; note = 2'-O-methyladenosine
ttttactgtctttattcctga

SEQ ID NO: 4370 - RNA, 21 nt, synthetic construct
  source 1..21: mol_type = other RNA
  modified_base 1: mod_base = OTHER; note = 2'-O-methyluridine-3'-phosphate
  modified_base 2: mod_base = OTHER; note = 2'-O-methyluridine-3'-phosphate
  modified_base 3: mod_base = OTHER; note = 2'-O-methyluridine-3'-phosphate
  modified_base 4: mod_base = OTHER; note = 2'-O-methyladenosine-3'-phosphate
  modified_base 5: mod_base = OTHER; note = 2'-O-methylcytidine-3'-phosphate
  modified_base 6: mod_base = OTHER; note = 2'-O-methyluridine-3'-phosphate
  modified_base 7: mod_base = OTHER; note = 2'-deoxy-2'-fluoroguanosine-3'-phosphate
  modified_base 8: mod_base = OTHER; note = 2'-O-methyluridine-3'-phosphate
  modified_base 9: mod_base = OTHER; note = 2'-deoxy-2'-fluorocytidine-3'-phosphate
  modified_base 10: mod_base = OTHER; note = 2'-deoxy-2'-fluorouridine-3'-phosphate
  modified_base 11: mod_base = OTHER; note = 2'-deoxy-2'-fluorouridine-3'-phosphate
  modified_base 12: mod_base = OTHER; note = 2'-O-methyluridine-3'-phosphate
  modified_base 13: mod_base = OTHER; note = 2'-O-methyladenosine-3'-phosphate
  modified_base 14: mod_base = OTHER; note = 2'-O-methyluridine-3'-phosphate
  modified_base 15: mod_base = OTHER; note = 2'-O-methyluridine-3'-phosphate
  modified_base 16: mod_base = OTHER; note = 2'-O-methylcytidine-3'-phosphate
  modified_base 17: mod_base = OTHER; note = 2'-O-methylcytidine-3'-phosphate
  modified_base 18: mod_base = OTHER; note = 2'-O-methyluridine-3'-phosphate
  modified_base 19: mod_base = OTHER; note = 2'-O-methylguanosine-3'-phosphate
  modified_base 20: mod_base = OTHER; note = 2'-O-methyladenosine-3'-phosphate
  modified_base 21: mod_base = OTHER; note = 2'-O-methyladenosine
tttactgtctttattcctgaa

SEQ ID NO: 4371 - RNA, 21 nt, synthetic construct
  source 1..21: mol_type = other RNA
  modified_base 1: mod_base = OTHER; note = 2'-O-methyluridine-3'-phosphate
  modified_base 2: mod_base = OTHER; note = 2'-O-methyladenosine-3'-phosphate
  modified_base 3: mod_base = OTHER; note = 2'-O-methylcytidine-3'-phosphate
  modified_base 4: mod_base = OTHER; note = 2'-O-methyluridine-3'-phosphate
  modified_base 5: mod_base = OTHER; note = 2'-O-methylguanosine-3'-phosphate
  modified_base 6: mod_base = OTHER; note = 2'-O-methyluridine-3'-phosphate
  modified_base 7: mod_base = OTHER; note = 2'-deoxy-2'-fluorocytidine-3'-phosphate
  modified_base 8: mod_base = OTHER; note = 2'-O-methyluridine-3'-phosphate
  modified_base 9: mod_base = OTHER; note = 2'-deoxy-2'-fluorouridine-3'-phosphate
  modified_base 10: mod_base = OTHER; note = 2'-deoxy-2'-fluorouridine-3'-phosphate
  modified_base 11: mod_base = OTHER; note = 2'-deoxy-2'-fluoroadenosine-3'-phosphate
  modified_base 12: mod_base = OTHER; note = 2'-O-methyluridine-3'-phosphate
  modified_base 13: mod_base = OTHER; note = 2'-O-methyluridine-3'-phosphate
  modified_base 14: mod_base = OTHER; note = 2'-O-methylcytidine-3'-phosphate
  modified_base 15: mod_base = OTHER; note = 2'-O-methylcytidine-3'-phosphate
  modified_base 16: mod_base = OTHER; note = 2'-O-methyluridine-3'-phosphate
  modified_base 17: mod_base = OTHER; note = 2'-O-methylguanosine-3'-phosphate
  modified_base 18: mod_base = OTHER; note = 2'-O-methyladenosine-3'-phosphate
  modified_base 19: mod_base = OTHER; note = 2'-O-methylcytidine-3'-phosphate
  modified_base 20: mod_base = OTHER; note = 2'-O-methyladenosine-3'-phosphate
  modified_base 21: mod_base = OTHER; note = 2'-O-methyladenosine
tactgtctttattcctgacaa

SEQ ID NO: 4372 - RNA, 21 nt, synthetic construct
  source 1..21: mol_type = other RNA
  modified_base 1: mod_base = OTHER; note = 2'-O-methyladenosine-3'-phosphate
  modified_base 2: mod_base = OTHER; note = 2'-O-methylcytidine-3'-phosphate
  modified_base 3: mod_base = OTHER; note = 2'-O-methyluridine-3'-phosphate
  modified_base 4: mod_base = OTHER; note = 2'-O-methylguanosine-3'-phosphate
  modified_base 5: mod_base = OTHER; note = 2'-O-methyluridine-3'-phosphate
  modified_base 6: mod_base = OTHER; note = 2'-O-methylcytidine-3'-phosphate
  modified_base 7: mod_base = OTHER; note = 2'-deoxy-2'-fluorouridine-3'-phosphate
  modified_base 8: mod_base = OTHER; note = 2'-O-methyluridine-3'-phosphate
  modified_base 9: mod_base = OTHER; note = 2'-deoxy-2'-fluorouridine-3'-phosphate
  modified_base 10: mod_base = OTHER; note = 2'-deoxy-2'-fluoroadenosine-3'-phosphate
  modified_base 11: mod_base = OTHER; note = 2'-deoxy-2'-fluorouridine-3'-phosphate
  modified_base 12: mod_base = OTHER; note = 2'-O-methyluridine-3'-phosphate
  modified_base 13: mod_base = OTHER; note = 2'-O-methylcytidine-3'-phosphate
  modified_base 14: mod_base = OTHER; note = 2'-O-methylcytidine-3'-phosphate
  modified_base 15: mod_base = OTHER; note = 2'-O-methyluridine-3'-phosphate
  modified_base 16: mod_base = OTHER; note = 2'-O-methylguanosine-3'-phosphate
  modified_base 17: mod_base = OTHER; note = 2'-O-methyladenosine-3'-phosphate
  modified_base 18: mod_base = OTHER; note = 2'-O-methylcytidine-3'-phosphate
  modified_base 19: mod_base = OTHER; note = 2'-O-methyladenosine-3'-phosphate
  modified_base 20: mod_base = OTHER; note = 2'-O-methylcytidine-3'-phosphate
  modified_base 21: mod_base = OTHER; note = 2'-O-methyladenosine
actgtctttattcctgacaca

SEQ ID NO: 4373 - RNA, 21 nt, synthetic construct
  source 1..21: mol_type = other RNA
  modified_base 1: mod_base = OTHER; note = 2'-O-methylcytidine-3'-phosphate
  modified_base 2: mod_base = OTHER; note = 2'-O-methyluridine-3'-phosphate
  modified_base 3: mod_base = OTHER; note = 2'-O-methylguanosine-3'-phosphate
  modified_base 4: mod_base = OTHER; note = 2'-O-methyluridine-3'-phosphate
  modified_base 5: mod_base = OTHER; note = 2'-O-methylcytidine-3'-phosphate
  modified_base 6: mod_base = OTHER; note = 2'-O-methyluridine-3'-phosphate
  modified_base 7: mod_base = OTHER; note = 2'-deoxy-2'-fluorouridine-3'-phosphate
  modified_base 8: mod_base = OTHER; note = 2'-O-methyluridine-3'-phosphate
  modified_base 9: mod_base = OTHER; note = 2'-deoxy-2'-fluoroadenosine-3'-phosphate
  modified_base 10: mod_base = OTHER; note = 2'-deoxy-2'-fluorouridine-3'-phosphate
  modified_base 11: mod_base = OTHER; note = 2'-deoxy-2'-fluorouridine-3'-phosphate
  modified_base 12: mod_base = OTHER; note = 2'-O-methylcytidine-3'-phosphate
  modified_base 13: mod_base = OTHER; note = 2'-O-methylcytidine-3'-phosphate
  modified_base 14: mod_base = OTHER; note = 2'-O-methyluridine-3'-phosphate
  modified_base 15: mod_base = OTHER; note = 2'-O-methylguanosine-3'-phosphate
  modified_base 16: mod_base = OTHER; note = 2'-O-methyladenosine-3'-phosphate
  modified_base 17: mod_base = OTHER; note = 2'-O-methylcytidine-3'-phosphate
  modified_base 18: mod_base = OTHER; note = 2'-O-methyladenosine-3'-phosphate
  modified_base 19: mod_base = OTHER; note = 2'-O-methylcytidine-3'-phosphate
  modified_base 20: mod_base = OTHER; note = 2'-O-methyluridine-3'-phosphate
  modified_base 21: mod_base = OTHER; note = 2'-O-methyladenosine
ctgtctttattcctgacacta

SEQ ID NO: 4374 - RNA, 21 nt, synthetic construct
  source 1..21: mol_type = other RNA
  modified_base 1: mod_base = OTHER; note = 2'-O-methylguanosine-3'-phosphate
  modified_base 2: mod_base = OTHER; note = 2'-O-methyluridine-3'-phosphate
  modified_base 3: mod_base = OTHER; note = 2'-O-methylcytidine-3'-phosphate
  modified_base 4: mod_base = OTHER; note = 2'-O-methyluridine-3'-phosphate
  modified_base 5: mod_base = OTHER; note = 2'-O-methyluridine-3'-phosphate
  modified_base 6: mod_base = OTHER; note = 2'-O-methyluridine-3'-phosphate
  modified_base 7: mod_base = OTHER; note = 2'-deoxy-2'-fluoroadenosine-3'-phosphate
  modified_base 8: mod_base = OTHER; note = 2'-O-methyluridine-3'-phosphate
  modified_base 9: mod_base = OTHER; note = 2'-deoxy-2'-fluorouridine-3'-phosphate
  modified_base 10: mod_base = OTHER; note = 2'-deoxy-2'-fluorocytidine-3'-phosphate
  modified_base 11: mod_base = OTHER; note = 2'-deoxy-2'-fluorocytidine-3'-phosphate
  modified_base 12: mod_base = OTHER; note = 2'-O-methyluridine-3'-phosphate
  modified_base 13: mod_base = OTHER; note = 2'-O-methylguanosine-3'-phosphate
  modified_base 14: mod_base = OTHER; note = 2'-O-methyladenosine-3'-phosphate
  modified_base 15: mod_base = OTHER; note = 2'-O-methylcytidine-3'-phosphate
  modified_base 16: mod_base = OTHER; note = 2'-O-methyladenosine-3'-phosphate
  modified_base 17: mod_base = OTHER; note = 2'-O-methylcytidine-3'-phosphate
  modified_base 18: mod_base = OTHER; note = 2'-O-methyluridine-3'-phosphate
  modified_base 19: mod_base = OTHER; note = 2'-O-methylguanosine-3'-phosphate
  modified_base 20: mod_base = OTHER; note = 2'-O-methyladenosine-3'-phosphate
  modified_base 21: mod_base = OTHER; note = 2'-O-methyladenosine
gtctttattcctgacactgaa

SEQ ID NO: 4375 - RNA, 21 nt, synthetic construct
  source 1..21: mol_type = other RNA
  modified_base 1: mod_base = OTHER; note = 2'-O-methylguanosine-3'-phosphate
  modified_base 2: mod_base = OTHER; note = 2'-O-methyladenosine-3'-phosphate
  modified_base 3: mod_base = OTHER; note = 2'-O-methylcytidine-3'-phosphate
  modified_base 4: mod_base = OTHER; note = 2'-O-methyladenosine-3'-phosphate
  modified_base 5: mod_base = OTHER; note = 2'-O-methylcytidine-3'-phosphate
  modified_base 6: mod_base = OTHER; note = 2'-O-methyluridine-3'-phosphate
  modified_base 7: mod_base = OTHER; note = 2'-deoxy-2'-fluoroguanosine-3'-phosphate
  modified_base 8: mod_base = OTHER; note = 2'-O-methyladenosine-3'-phosphate
  modified_base 9: mod_base = OTHER; note = 2'-deoxy-2'-fluoroguanosine-3'-phosphate
  modified_base 10: mod_base = OTHER; note = 2'-deoxy-2'-fluoroadenosine-3'-phosphate
  modified_base 11: mod_base = OTHER; note = 2'-deoxy-2'-fluorouridine-3'-phosphate
  modified_base 12: mod_base = OTHER; note = 2'-O-methylguanosine-3'-phosphate
  modified_base 13: mod_base = OTHER; note = 2'-O-methyladenosine-3'-phosphate
  modified_base 14: mod_base = OTHER; note = 2'-O-methyladenosine-3'-phosphate
  modified_base 15: mod_base = OTHER; note = 2'-O-methyluridine-3'-phosphate
  modified_base 16: mod_base = OTHER; note = 2'-O-methylguanosine-3'-phosphate
  modified_base 17: mod_base = OTHER; note = 2'-O-methyluridine-3'-phosphate
  modified_base 18: mod_base = OTHER; note = 2'-O-methyluridine-3'-phosphate
  modified_base 19: mod_base = OTHER; note = 2'-O-methyluridine-3'-phosphate
  modified_base 20: mod_base = OTHER; note = 2'-O-methyluridine-3'-phosphate
  modified_base 21: mod_base = OTHER; note = 2'-O-methyladenosine
gacactgagatgaatgtttta

SEQ ID NO: 4376 - RNA, 21 nt, synthetic construct
  source 1..21: mol_type = other RNA
  modified_base 1: mod_base = OTHER; note = 2'-O-methyladenosine-3'-phosphate
  modified_base 2: mod_base = OTHER; note = 2'-O-methylcytidine-3'-phosphate
  modified_base 3: mod_base = OTHER; note = 2'-O-methyladenosine-3'-phosphate
  modified_base 4: mod_base = OTHER; note = 2'-O-methylcytidine-3'-phosphate
  modified_base 5: mod_base = OTHER; note = 2'-O-methyluridine-3'-phosphate
  modified_base 6: mod_base = OTHER; note = 2'-O-methylguanosine-3'-phosphate
  modified_base 7: mod_base = OTHER; note = 2'-deoxy-2'-fluoroadenosine-3'-phosphate
  modified_base 8: mod_base = OTHER; note = 2'-O-methylguanosine-3'-phosphate
  modified_base 9: mod_base = OTHER; note = 2'-deoxy-2'-fluoroadenosine-3'-phosphate
  modified_base 10: mod_base = OTHER; note = 2'-deoxy-2'-fluorouridine-3'-phosphate
  modified_base 11: mod_base = OTHER; note = 2'-deoxy-2'-fluoroguanosine-3'-phosphate
  modified_base 12: mod_base = OTHER; note = 2'-O-methyladenosine-3'-phosphate
  modified_base 13: mod_base = OTHER; note = 2'-O-methyladenosine-3'-phosphate
  modified_base 14: mod_base = OTHER; note = 2'-O-methyluridine-3'-phosphate
  modified_base 15: mod_base = OTHER; note = 2'-O-methylguanosine-3'-phosphate
  modified_base 16: mod_base = OTHER; note = 2'-O-methyluridine-3'-phosphate
  modified_base 17: mod_base = OTHER; note = 2'-O-methyluridine-3'-phosphate
  modified_base 18: mod_base = OTHER; note = 2'-O-methyluridine-3'-phosphate
  modified_base 19: mod_base = OTHER; note = 2'-O-methyluridine-3'-phosphate
  modified_base 20: mod_base = OTHER; note = 2'-O-methylcytidine-3'-phosphate
  modified_base 21: mod_base = OTHER; note = 2'-O-methyladenosine
acactgagatgaatgttttca

SEQ ID NO: 4377 - RNA, 21 nt, synthetic construct
  source 1..21: mol_type = other RNA
  modified_base 1: mod_base = OTHER; note = 2'-O-methylcytidine-3'-phosphate
  modified_base 2: mod_base = OTHER; note = 2'-O-methyladenosine-3'-phosphate
  modified_base 3: mod_base = OTHER; note = 2'-O-methylcytidine-3'-phosphate
  modified_base 4: mod_base = OTHER; note = 2'-O-methyluridine-3'-phosphate
  modified_base 5: mod_base = OTHER; note = 2'-O-methylguanosine-3'-phosphate
  modified_base 6: mod_base = OTHER; note = 2'-O-methyladenosine-3'-phosphate
  modified_base 7: mod_base = OTHER; note = 2'-deoxy-2'-fluoroguanosine-3'-phosphate
  modified_base 8: mod_base = OTHER; note = 2'-O-methyladenosine-3'-phosphate
  modified_base 9: mod_base = OTHER; note = 2'-deoxy-2'-fluorouridine-3'-phosphate
  modified_base 10: mod_base = OTHER; note = 2'-deoxy-2'-fluoroguanosine-3'-phosphate
  modified_base 11: mod_base = OTHER; note = 2'-deoxy-2'-fluoroadenosine-3'-phosphate
  modified_base 12: mod_base = OTHER; note = 2'-O-methyladenosine-3'-phosphate
  modified_base 13: mod_base = OTHER; note = 2'-O-methyluridine-3'-phosphate
  modified_base 14: mod_base = OTHER; note = 2'-O-methylguanosine-3'-phosphate
  modified_base 15: mod_base = OTHER; note = 2'-O-methyluridine-3'-phosphate
  modified_base 16: mod_base = OTHER; note = 2'-O-methyluridine-3'-phosphate
  modified_base 17: mod_base = OTHER; note = 2'-O-methyluridine-3'-phosphate
  modified_base 18: mod_base = OTHER; note = 2'-O-methyluridine-3'-phosphate
  modified_base 19: mod_base = OTHER; note = 2'-O-methylcytidine-3'-phosphate
  modified_base 20: mod_base = OTHER; note = 2'-O-methyladenosine-3'-phosphate
  modified_base 21: mod_base = OTHER; note = 2'-O-methyladenosine
cactgagatgaatgttttcaa

SEQ ID NO: 4378 - RNA, 21 nt, synthetic construct
  source 1..21: mol_type = other RNA
  modified_base 1: mod_base = OTHER; note = 2'-O-methyladenosine-3'-phosphate
  modified_base 2: mod_base = OTHER; note = 2'-O-methylcytidine-3'-phosphate
  modified_base 3: mod_base = OTHER; note = 2'-O-methyluridine-3'-phosphate
  modified_base 4: mod_base = OTHER; note = 2'-O-methylguanosine-3'-phosphate
  modified_base 5: mod_base = OTHER; note = 2'-O-methyladenosine-3'-phosphate
  modified_base 6: mod_base = OTHER; note = 2'-O-methylguanosine-3'-phosphate
  modified_base 7: mod_base = OTHER; note = 2'-deoxy-2'-fluoroadenosine-3'-phosphate
  modified_base 8: mod_base = OTHER; note = 2'-O-methyluridine-3'-phosphate
  modified_base 9: mod_base = OTHER; note = 2'-deoxy-2'-fluoroguanosine-3'-phosphate
  modified_base 10: mod_base = OTHER; note = 2'-deoxy-2'-fluoroadenosine-3'-phosphate
  modified_base 11: mod_base = OTHER; note = 2'-deoxy-2'-fluoroadenosine-3'-phosphate
  modified_base 12: mod_base = OTHER; note = 2'-O-methyluridine-3'-phosphate
  modified_base 13: mod_base = OTHER; note = 2'-O-methylguanosine-3'-phosphate
  modified_base 14: mod_base = OTHER; note = 2'-O-methyluridine-3'-phosphate
  modified_base 15: mod_base = OTHER; note = 2'-O-methyluridine-3'-phosphate
  modified_base 16: mod_base = OTHER; note = 2'-O-methyluridine-3'-phosphate
  modified_base 17: mod_base = OTHER; note = 2'-O-methyluridine-3'-phosphate
  modified_base 18: mod_base = OTHER; note = 2'-O-methylcytidine-3'-phosphate
  modified_base 19: mod_base = OTHER; note = 2'-O-methyladenosine-3'-phosphate
  modified_base 20: mod_base = OTHER; note = 2'-O-methyladenosine-3'-phosphate
  modified_base 21: mod_base = OTHER; note = 2'-O-methyladenosine
actgagatgaatgttttcaaa

SEQ ID NO: 4379 - RNA, 21 nt, synthetic construct
  source 1..21: mol_type = other RNA
  modified_base 1: mod_base = OTHER; note = 2'-O-methylcytidine-3'-phosphate
  modified_base 2: mod_base = OTHER; note = 2'-O-methyluridine-3'-phosphate
  modified_base 3: mod_base = OTHER; note = 2'-O-methylguanosine-3'-phosphate
  modified_base 4: mod_base = OTHER; note = 2'-O-methyladenosine-3'-phosphate
  modified_base 5: mod_base = OTHER; note = 2'-O-methylguanosine-3'-phosphate
  modified_base 6: mod_base = OTHER; note = 2'-O-methyladenosine-3'-phosphate
  modified_base 7: mod_base = OTHER; note = 2'-deoxy-2'-fluorouridine-3'-phosphate
  modified_base 8: mod_base = OTHER; note = 2'-O-methylguanosine-3'-phosphate
  modified_base 9: mod_base = OTHER; note = 2'-deoxy-2'-fluoroadenosine-3'-phosphate
  modified_base 10: mod_base = OTHER; note = 2'-deoxy-2'-fluoroadenosine-3'-phosphate
  modified_base 11: mod_base = OTHER; note = 2'-deoxy-2'-fluorouridine-3'-phosphate
  modified_base 12: mod_base = OTHER; note = 2'-O-methylguanosine-3'-phosphate
  modified_base 13: mod_base = OTHER; note = 2'-O-methyluridine-3'-phosphate
  modified_base 14: mod_base = OTHER; note = 2'-O-methyluridine-3'-phosphate
  modified_base 15: mod_base = OTHER; note = 2'-O-methyluridine-3'-phosphate
  modified_base 16: mod_base = OTHER; note = 2'-O-methyluridine-3'-phosphate
  modified_base 17: mod_base = OTHER; note = 2'-O-methylcytidine-3'-phosphate
  modified_base 18: mod_base = OTHER; note = 2'-O-methyladenosine-3'-phosphate
  modified_base 19: mod_base = OTHER; note = 2'-O-methyladenosine-3'-phosphate
  modified_base 20: mod_base = OTHER; note = 2'-O-methyladenosine-3'-phosphate
  modified_base 21: mod_base = OTHER; note = 2'-O-methyladenosine
ctgagatgaatgttttcaaaa

SEQ ID NO: 4380 - RNA, 21 nt, synthetic construct
  source 1..21: mol_type = other RNA
  modified_base 1: mod_base = OTHER; note = 2'-O-methyluridine-3'-phosphate
  modified_base 2: mod_base = OTHER; note = 2'-O-methylguanosine-3'-phosphate
  modified_base 3: mod_base = OTHER; note = 2'-O-methyladenosine-3'-phosphate
  modified_base 4: mod_base = OTHER; note = 2'-O-methylguanosine-3'-phosphate
  modified_base 5: mod_base = OTHER; note = 2'-O-methyladenosine-3'-phosphate
  modified_base 6: mod_base = OTHER; note = 2'-O-methyluridine-3'-phosphate
  modified_base 7: mod_base = OTHER; note = 2'-deoxy-2'-fluoroguanosine-3'-phosphate
  modified_base 8: mod_base = OTHER; note = 2'-O-methyladenosine-3'-phosphate
  modified_base 9: mod_base = OTHER; note = 2'-deoxy-2'-fluoroadenosine-3'-phosphate
  modified_base 10: mod_base = OTHER; note = 2'-deoxy-2'-fluorouridine-3'-phosphate
  modified_base 11: mod_base = OTHER; note = 2'-deoxy-2'-fluoroguanosine-3'-phosphate
  modified_base 12: mod_base = OTHER; note = 2'-O-methyluridine-3'-phosphate
  modified_base 13: mod_base = OTHER; note = 2'-O-methyluridine-3'-phosphate
  modified_base 14: mod_base = OTHER; note = 2'-O-methyluridine-3'-phosphate
  modified_base 15: mod_base = OTHER; note = 2'-O-methyluridine-3'-phosphate
  modified_base 16: mod_base = OTHER; note = 2'-O-methylcytidine-3'-phosphate
  modified_base 17: mod_base = OTHER; note = 2'-O-methyladenosine-3'-phosphate
  modified_base 18: mod_base = OTHER; note = 2'-O-methyladenosine-3'-phosphate
  modified_base 19: mod_base = OTHER; note = 2'-O-methyladenosine-3'-phosphate
  modified_base 20: mod_base = OTHER; note = 2'-O-methylguanosine-3'-phosphate
  modified_base 21: mod_base = OTHER; note = 2'-O-methyladenosine
tgagatgaatgttttcaaaga

SEQ ID NO: 4381 - RNA, 21 nt, synthetic construct
  source 1..21: mol_type = other RNA
  modified_base 1: mod_base = OTHER; note = 2'-O-methylguanosine-3'-phosphate
  modified_base 2: mod_base = OTHER; note = 2'-O-methyladenosine-3'-phosphate
  modified_base 3: mod_base = OTHER; note = 2'-O-methylguanosine-3'-phosphate
  modified_base 4: mod_base = OTHER; note = 2'-O-methyladenosine-3'-phosphate
  modified_base 5: mod_base = OTHER; note = 2'-O-methyluridine-3'-phosphate
  modified_base 6: mod_base = OTHER; note = 2'-O-methylguanosine-3'-phosphate
  modified_base 7: mod_base = OTHER; note = 2'-deoxy-2'-fluoroadenosine-3'-phosphate
  modified_base 8: mod_base = OTHER; note = 2'-O-methyladenosine-3'-phosphate
  modified_base 9: mod_base = OTHER; note = 2'-deoxy-2'-fluorouridine-3'-phosphate
  modified_base 10: mod_base = OTHER; note = 2'-deoxy-2'-fluoroguanosine-3'-phosphate
  modified_base 11: mod_base = OTHER; note = 2'-deoxy-2'-fluorouridine-3'-phosphate
  modified_base 12: mod_base = OTHER; note = 2'-O-methyluridine-3'-phosphate
  modified_base 13: mod_base = OTHER; note = 2'-O-methyluridine-3'-phosphate
  modified_base 14: mod_base = OTHER; note = 2'-O-methyluridine-3'-phosphate
  modified_base 15: mod_base = OTHER; note = 2'-O-methylcytidine-3'-phosphate
  modified_base 16: mod_base = OTHER; note = 2'-O-methyladenosine-3'-phosphate
  modified_base 17: mod_base = OTHER; note = 2'-O-methyladenosine-3'-phosphate
  modified_base 18: mod_base = OTHER; note = 2'-O-methyladenosine-3'-phosphate
  modified_base 19: mod_base = OTHER; note = 2'-O-methylguanosine-3'-phosphate
  modified_base 20: mod_base = OTHER; note = 2'-O-methylcytidine-3'-phosphate
  modified_base 21: mod_base = OTHER; note = 2'-O-methyladenosine
gagatgaatgttttcaaagca

SEQ ID NO: 4382 - RNA, 21 nt, synthetic construct
  source 1..21: mol_type = other RNA
  modified_base 1: mod_base = OTHER; note = 2'-O-methyladenosine-3'-phosphate
  modified_base 2: mod_base = OTHER; note = 2'-O-methylguanosine-3'-phosphate
  modified_base 3: mod_base = OTHER; note = 2'-O-methyladenosine-3'-phosphate
  modified_base 4: mod_base = OTHER; note = 2'-O-methyluridine-3'-phosphate
  modified_base 5: mod_base = OTHER; note = 2'-O-methylguanosine-3'-phosphate
  modified_base 6: mod_base = OTHER; note = 2'-O-methyladenosine-3'-phosphate
  modified_base 7: mod_base = OTHER; note = 2'-deoxy-2'-fluoroadenosine-3'-phosphate
  modified_base 8: mod_base = OTHER; note = 2'-O-methyluridine-3'-phosphate
  modified_base 9: mod_base = OTHER; note = 2'-deoxy-2'-fluoroguanosine-3'-phosphate
  modified_base 10: mod_base = OTHER; note = 2'-deoxy-2'-fluorouridine-3'-phosphate
  modified_base 11: mod_base = OTHER; note = 2'-deoxy-2'-fluorouridine-3'-phosphate
  modified_base 12: mod_base = OTHER; note = 2'-O-methyluridine-3'-phosphate
  modified_base 13: mod_base = OTHER; note = 2'-O-methyluridine-3'-phosphate
  modified_base 14: mod_base = OTHER; note = 2'-O-methylcytidine-3'-phosphate
  modified_base 15: mod_base = OTHER; note = 2'-O-methyladenosine-3'-phosphate
  modified_base 16: mod_base = OTHER; note = 2'-O-methyladenosine-3'-phosphate
  modified_base 17: mod_base = OTHER; note = 2'-O-methyladenosine-3'-phosphate
  modified_base 18: mod_base = OTHER; note = 2'-O-methylguanosine-3'-phosphate
  modified_base 19: mod_base = OTHER; note = 2'-O-methylcytidine-3'-phosphate
  modified_base 20: mod_base = OTHER; note = 2'-O-methyluridine-3'-phosphate
  modified_base 21: mod_base = OTHER; note = 2'-O-methyladenosine
agatgaatgttttcaaagcta

SEQ ID NO: 4383 - RNA, 21 nt, synthetic construct
  source 1..21: mol_type = other RNA
  modified_base 1: mod_base = OTHER; note = 2'-O-methyladenosine-3'-phosphate
  modified_base 2: mod_base = OTHER; note = 2'-O-methyladenosine-3'-phosphate
  modified_base 3: mod_base = OTHER; note = 2'-O-methyluridine-3'-phosphate
  modified_base 4: mod_base = OTHER; note = 2'-O-methylguanosine-3'-phosphate
  modified_base 5: mod_base = OTHER; note = 2'-O-methyluridine-3'-phosphate
  modified_base 6: mod_base = OTHER; note = 2'-O-methyluridine-3'-phosphate
  modified_base 7: mod_base = OTHER; note = 2'-deoxy-2'-fluorouridine-3'-phosphate
  modified_base 8: mod_base = OTHER; note = 2'-O-methyluridine-3'-phosphate
  modified_base 9: mod_base = OTHER; note = 2'-deoxy-2'-fluorocytidine-3'-phosphate
  modified_base 10: mod_base = OTHER; note = 2'-deoxy-2'-fluoroadenosine-3'-phosphate
  modified_base 11: mod_base = OTHER; note = 2'-deoxy-2'-fluoroadenosine-3'-phosphate
  modified_base 12: mod_base = OTHER; note = 2'-O-methyladenosine-3'-phosphate
  modified_base 13: mod_base = OTHER; note = 2'-O-methylguanosine-3'-phosphate
  modified_base 14: mod_base = OTHER; note = 2'-O-methylcytidine-3'-phosphate
  modified_base 15: mod_base = OTHER; note = 2'-O-methyluridine-3'-phosphate
  modified_base 16: mod_base = OTHER; note = 2'-O-methylguanosine-3'-phosphate
  modified_base 17: mod_base = OTHER; note = 2'-O-methylcytidine-3'-phosphate
  modified_base 18: mod_base = OTHER; note = 2'-O-methyladenosine-3'-phosphate
  modified_base 19: mod_base = OTHER; note = 2'-O-methyladenosine-3'-phosphate
  modified_base 20: mod_base = OTHER; note = 2'-O-methylcytidine-3'-phosphate
  modified_base 21: mod_base = OTHER; note = 2'-O-methyladenosine
aatgttttcaaagctgcaaca

SEQ ID NO: 4384 - RNA, 21 nt, synthetic construct
  source 1..21: mol_type = other RNA
  modified_base 1: mod_base = OTHER; note = 2'-O-methyladenosine-3'-phosphate
  modified_base 2: mod_base = OTHER; note = 2'-O-methyluridine-3'-phosphate
  modified_base 3: mod_base = OTHER; note = 2'-O-methylguanosine-3'-phosphate
  modified_base 4: mod_base = OTHER; note = 2'-O-methyluridine-3'-phosphate
  modified_base 5: mod_base = OTHER; note = 2'-O-methyluridine-3'-phosphate
  modified_base 6: mod_base = OTHER; note = 2'-O-methyluridine-3'-phosphate
  modified_base 7: mod_base = OTHER; note = 2'-deoxy-2'-fluorouridine-3'-phosphate
  modified_base 8: mod_base = OTHER; note = 2'-O-methylcytidine-3'-phosphate
  modified_base 9: mod_base = OTHER; note = 2'-deoxy-2'-fluoroadenosine-3'-phosphate
  modified_base 10: mod_base = OTHER; note = 2'-deoxy-2'-fluoroadenosine-3'-phosphate
  modified_base 11: mod_base = OTHER; note = 2'-deoxy-2'-fluoroadenosine-3'-phosphate
  modified_base 12: mod_base = OTHER; note = 2'-O-methylguanosine-3'-phosphate
  modified_base 13: mod_base = OTHER; note = 2'-O-methylcytidine-3'-phosphate
  modified_base 14: mod_base = OTHER; note = 2'-O-methyluridine-3'-phosphate
  modified_base 15: mod_base = OTHER; note = 2'-O-methylguanosine-3'-phosphate
  modified_base 16: mod_base = OTHER; note = 2'-O-methylcytidine-3'-phosphate
  modified_base 17: mod_base = OTHER; note = 2'-O-methyladenosine-3'-phosphate
  modified_base 18: mod_base = OTHER; note = 2'-O-methyladenosine-3'-phosphate
  modified_base 19: mod_base = OTHER; note = 2'-O-methylcytidine-3'-phosphate
  modified_base 20: mod_base = OTHER; note = 2'-O-methyladenosine-3'-phosphate
  modified_base 21: mod_base = OTHER; note = 2'-O-methyladenosine
atgttttcaaagctgcaacaa

SEQ ID NO: 4385 - RNA, 21 nt, synthetic construct
  source 1..21: mol_type = other RNA
  modified_base 1: mod_base = OTHER; note = 2'-O-methyluridine-3'-phosphate
  modified_base 2: mod_base = OTHER; note = 2'-O-methylguanosine-3'-phosphate
  modified_base 3: mod_base = OTHER; note = 2'-O-methyluridine-3'-phosphate
  modified_base 4: mod_base = OTHER; note = 2'-O-methyluridine-3'-phosphate
  modified_base 5: mod_base = OTHER; note = 2'-O-methyluridine-3'-phosphate
  modified_base 6: mod_base = OTHER; note = 2'-O-methyluridine-3'-phosphate
  modified_base 7: mod_base = OTHER; note = 2'-deoxy-2'-fluorocytidine-3'-phosphate
  modified_base 8: mod_base = OTHER; note = 2'-O-methyladenosine-3'-phosphate
  modified_base 9: mod_base = OTHER; note = 2'-deoxy-2'-fluoroadenosine-3'-phosphate
  modified_base 10: mod_base = OTHER; note = 2'-deoxy-2'-fluoroadenosine-3'-phosphate
  modified_base 11: mod_base = OTHER; note = 2'-deoxy-2'-fluoroguanosine-3'-phosphate
  modified_base 12: mod_base = OTHER; note = 2'-O-methylcytidine-3'-phosphate
  modified_base 13: mod_base = OTHER; note = 2'-O-methyluridine-3'-phosphate
  modified_base 14: mod_base = OTHER; note = 2'-O-methylguanosine-3'-phosphate
  modified_base 15: mod_base = OTHER; note = 2'-O-methylcytidine-3'-phosphate
  modified_base 16: mod_base = OTHER; note = 2'-O-methyladenosine-3'-phosphate
  modified_base 17: mod_base = OTHER; note = 2'-O-methyladenosine-3'-phosphate
  modified_base 18: mod_base = OTHER; note = 2'-O-methylcytidine-3'-phosphate
  modified_base 19: mod_base = OTHER; note = 2'-O-methyladenosine-3'-phosphate
  modified_base 20: mod_base = OTHER; note = 2'-O-methyluridine-3'-phosphate
  modified_base 21: mod_base = OTHER; note = 2'-O-methyladenosine
tgttttcaaagctgcaacata

SEQ ID NO: 4386 - RNA, 21 nt, synthetic construct
  source 1..21: mol_type = other RNA
  modified_base 1: mod_base = OTHER; note = 2'-O-methylguanosine-3'-phosphate
  modified_base 2: mod_base = OTHER; note = 2'-O-methyluridine-3'-phosphate
  modified_base 3: mod_base = OTHER; note = 2'-O-methyluridine-3'-phosphate
  modified_base 4: mod_base = OTHER; note = 2'-O-methyluridine-3'-phosphate
  modified_base 5: mod_base = OTHER; note = 2'-O-methyluridine-3'-phosphate
  modified_base 6: mod_base = OTHER; note = 2'-O-methylcytidine-3'-phosphate
  modified_base 7: mod_base = OTHER; note = 2'-deoxy-2'-fluoroadenosine-3'-phosphate
  modified_base 8: mod_base = OTHER; note = 2'-O-methyladenosine-3'-phosphate
  modified_base 9: mod_base = OTHER; note = 2'-deoxy-2'-fluoroadenosine-3'-phosphate
  modified_base 10: mod_base = OTHER; note = 2'-deoxy-2'-fluoroguanosine-3'-phosphate
  modified_base 11: mod_base = OTHER; note = 2'-deoxy-2'-fluorocytidine-3'-phosphate
  modified_base 12: mod_base = OTHER; note = 2'-O-methyluridine-3'-phosphate
  modified_base 13: mod_base = OTHER; note = 2'-O-methylguanosine-3'-phosphate
  modified_base 14: mod_base = OTHER; note = 2'-O-methylcytidine-3'-phosphate
  modified_base 15: mod_base = OTHER; note = 2'-O-methyladenosine-3'-phosphate
  modified_base 16: mod_base = OTHER; note = 2'-O-methyladenosine-3'-phosphate
  modified_base 17: mod_base = OTHER; note = 2'-O-methylcytidine-3'-phosphate
  modified_base 18: mod_base = OTHER; note = 2'-O-methyladenosine-3'-phosphate
  modified_base 19: mod_base = OTHER; note = 2'-O-methyluridine-3'-phosphate
  modified_base 20: mod_base = OTHER; note = 2'-O-methylguanosine-3'-phosphate
  modified_base 21: mod_base = OTHER; note = 2'-O-methyladenosine
gttttcaaagctgcaacatga

SEQ ID NO: 4387 - RNA, 21 nt, synthetic construct
  source 1..21: mol_type = other RNA
  modified_base 1: mod_base = OTHER; note = 2'-O-methyladenosine-3'-phosphate
  modified_base 2: mod_base = OTHER; note = 2'-O-methyladenosine-3'-phosphate
  modified_base 3: mod_base = OTHER; note = 2'-O-methylcytidine-3'-phosphate
  modified_base 4: mod_base = OTHER; note = 2'-O-methylcytidine-3'-phosphate
  modified_base 5: mod_base = OTHER; note = 2'-O-methylguanosine-3'-phosphate
  modified_base 6: mod_base = OTHER; note = 2'-O-methyladenosine-3'-phosphate
  modified_base 7: mod_base = OTHER; note = 2'-deoxy-2'-fluorouridine-3'-phosphate
  modified_base 8: mod_base = OTHER; note = 2'-O-methyluridine-3'-phosphate
  modified_base 9: mod_base = OTHER; note = 2'-deoxy-2'-fluorocytidine-3'-phosphate
  modified_base 10: mod_base = OTHER; note = 2'-deoxy-2'-fluorouridine-3'-phosphate
  modified_base 11: mod_base = OTHER; note = 2'-deoxy-2'-fluoroguanosine-3'-phosphate
  modified_base 12: mod_base = OTHER; note = 2'-O-methyluridine-3'-phosphate
  modified_base 13: mod_base = OTHER; note = 2'-O-methyluridine-3'-phosphate
  modified_base 14: mod_base = OTHER; note = 2'-O-methyladenosine-3'-phosphate
  modified_base 15: mod_base = OTHER; note = 2'-O-methyluridine-3'-phosphate
  modified_base 16: mod_base = OTHER; note = 2'-O-methyluridine-3'-phosphate
  modified_base 17: mod_base = OTHER; note = 2'-O-methylguanosine-3'-phosphate
  modified_base 18: mod_base = OTHER; note = 2'-O-methylguanosine-3'-phosphate
  modified_base 19: mod_base = OTHER; note = 2'-O-methylguanosine-3'-phosphate
  modified_base 20: mod_base = OTHER; note = 2'-O-methyladenosine-3'-phosphate
  modified_base 21: mod_base = OTHER; note = 2'-O-methyladenosine
aaccgattctgttattgggaa

SEQ ID NO: 4388 - RNA, 21 nt, synthetic construct
  source 1..21: mol_type = other RNA
  modified_base 1: mod_base = OTHER; note = 2'-O-methyladenosine-3'-phosphate
  modified_base 2: mod_base = OTHER; note = 2'-O-methylcytidine-3'-phosphate
  modified_base 3: mod_base = OTHER; note = 2'-O-methylcytidine-3'-phosphate
  modified_base 4: mod_base = OTHER; note = 2'-O-methylguanosine-3'-phosphate
  modified_base 5: mod_base = OTHER; note = 2'-O-methyladenosine-3'-phosphate
  modified_base 6: mod_base = OTHER; note = 2'-O-methyluridine-3'-phosphate
  modified_base 7: mod_base = OTHER; note = 2'-deoxy-2'-fluorouridine-3'-phosphate
  modified_base 8: mod_base = OTHER; note = 2'-O-methylcytidine-3'-phosphate
  modified_base 9: mod_base = OTHER; note = 2'-deoxy-2'-fluorouridine-3'-phosphate
  modified_base 10: mod_base = OTHER; note = 2'-deoxy-2'-fluoroguanosine-3'-phosphate
  modified_base 11: mod_base = OTHER; note = 2'-deoxy-2'-fluorouridine-3'-phosphate
  modified_base 12: mod_base = OTHER; note = 2'-O-methyluridine-3'-phosphate
  modified_base 13: mod_base = OTHER; note = 2'-O-methyladenosine-3'-phosphate
  modified_base 14: mod_base = OTHER; note = 2'-O-methyluridine-3'-phosphate
  modified_base 15: mod_base = OTHER; note = 2'-O-methyluridine-3'-phosphate
  modified_base 16: mod_base = OTHER; note = 2'-O-methylguanosine-3'-phosphate
  modified_base 17: mod_base = OTHER; note = 2'-O-methylguanosine-3'-phosphate
  modified_base 18: mod_base = OTHER; note = 2'-O-methylguanosine-3'-phosphate
  modified_base 19: mod_base = OTHER; note = 2'-O-methyladenosine-3'-phosphate
  modified_base 20: mod_base = OTHER; note = 2'-O-methyladenosine-3'-phosphate
  modified_base 21: mod_base = OTHER; note = 2'-O-methyladenosine
accgattctgttattgggaaa

SEQ ID NO: 4389 - RNA, 21 nt, synthetic construct
  source 1..21: mol_type = other RNA
  modified_base 1: mod_base = OTHER; note = 2'-O-methylcytidine-3'-phosphate
  modified_base 2: mod_base = OTHER; note = 2'-O-methylcytidine-3'-phosphate
  modified_base 3: mod_base = OTHER; note = 2'-O-methylguanosine-3'-phosphate
  modified_base 4: mod_base = OTHER; note = 2'-O-methyladenosine-3'-phosphate
  modified_base 5: mod_base = OTHER; note = 2'-O-methyluridine-3'-phosphate
  modified_base 6: mod_base = OTHER; note = 2'-O-methyluridine-3'-phosphate
  modified_base 7: mod_base = OTHER; note = 2'-deoxy-2'-fluorocytidine-3'-phosphate
  modified_base 8: mod_base = OTHER; note = 2'-O-methyluridine-3'-phosphate
  modified_base 9: mod_base = OTHER; note = 2'-deoxy-2'-fluoroguanosine-3'-phosphate
  modified_base 10: mod_base = OTHER; note = 2'-deoxy-2'-fluorouridine-3'-phosphate
  modified_base 11: mod_base = OTHER; note = 2'-deoxy-2'-fluorouridine-3'-phosphate
  modified_base 12: mod_base = OTHER; note = 2'-O-methyladenosine-3'-phosphate
  modified_base 13: mod_base = OTHER; note = 2'-O-methyluridine-3'-phosphate
  modified_base 14: mod_base = OTHER; note = 2'-O-methyluridine-3'-phosphate
  modified_base 15: mod_base = OTHER; note = 2'-O-methylguanosine-3'-phosphate
  modified_base 16: mod_base = OTHER; note = 2'-O-methylguanosine-3'-phosphate
  modified_base 17: mod_base = OTHER; note = 2'-O-methylguanosine-3'-phosphate
  modified_base 18: mod_base = OTHER; note = 2'-O-methyladenosine-3'-phosphate
  modified_base 19: mod_base = OTHER; note = 2'-O-methyladenosine-3'-phosphate
  modified_base 20: mod_base = OTHER; note = 2'-O-methyluridine-3'-phosphate
  modified_base 21: mod_base = OTHER; note = 2'-O-methyladenosine
ccgattctgttattgggaata

SEQ ID NO: 4390 - RNA, 21 nt, synthetic construct
  source 1..21: mol_type = other RNA
  modified_base 1: mod_base = OTHER; note = 2'-O-methylcytidine-3'-phosphate
  modified_base 2: mod_base = OTHER; note = 2'-O-methylguanosine-3'-phosphate
  modified_base 3: mod_base = OTHER; note = 2'-O-methyladenosine-3'-phosphate
  modified_base 4: mod_base = OTHER; note = 2'-O-methyluridine-3'-phosphate
  modified_base 5: mod_base = OTHER; note = 2'-O-methyluridine-3'-phosphate
  modified_base 6: mod_base = OTHER; note = 2'-O-methylcytidine-3'-phosphate
  modified_base 7: mod_base = OTHER; note = 2'-deoxy-2'-fluorouridine-3'-phosphate
  modified_base 8: mod_base = OTHER; note = 2'-O-methylguanosine-3'-phosphate
  modified_base 9: mod_base = OTHER; note = 2'-deoxy-2'-fluorouridine-3'-phosphate
  modified_base 10: mod_base = OTHER; note = 2'-deoxy-2'-fluorouridine-3'-phosphate
  modified_base 11: mod_base = OTHER; note = 2'-deoxy-2'-fluoroadenosine-3'-phosphate
  modified_base 12: mod_base = OTHER; note = 2'-O-methyluridine-3'-phosphate
  modified_base 13: mod_base = OTHER; note = 2'-O-methyluridine-3'-phosphate
  modified_base 14: mod_base = OTHER; note = 2'-O-methylguanosine-3'-phosphate
  modified_base 15: mod_base = OTHER; note = 2'-O-methylguanosine-3'-phosphate
  modified_base 16: mod_base = OTHER; note = 2'-O-methylguanosine-3'-phosphate
  modified_base 17: mod_base = OTHER; note = 2'-O-methyladenosine-3'-phosphate
  modified_base 18: mod_base = OTHER; note = 2'-O-methyladenosine-3'-phosphate
  modified_base 19: mod_base = OTHER; note = 2'-O-methyluridine-3'-phosphate
  modified_base 20: mod_base = OTHER; note = 2'-O-methylguanosine-3'-phosphate
  modified_base 21: mod_base = OTHER; note = 2'-O-methyladenosine
cgattctgttattgggaatga

SEQ ID NO: 4391 - RNA, 21 nt, synthetic construct
  source 1..21: mol_type = other RNA
  modified_base 1: mod_base = OTHER; note = 2'-O-methylguanosine-3'-phosphate
  modified_base 2: mod_base = OTHER; note = 2'-O-methyladenosine-3'-phosphate
  modified_base 3: mod_base = OTHER; note = 2'-O-methyluridine-3'-phosphate
  modified_base 4: mod_base = OTHER; note = 2'-O-methyluridine-3'-phosphate
  modified_base 5: mod_base = OTHER; note = 2'-O-methylcytidine-3'-phosphate
  modified_base 6: mod_base = OTHER; note = 2'-O-methyluridine-3'-phosphate
  modified_base 7: mod_base = OTHER; note = 2'-deoxy-2'-fluoroguanosine-3'-phosphate
  modified_base 8: mod_base = OTHER; note = 2'-O-methyluridine-3'-phosphate
  modified_base 9: mod_base = OTHER; note = 2'-deoxy-2'-fluorouridine-3'-phosphate
  modified_base 10: mod_base = OTHER; note = 2'-deoxy-2'-fluoroadenosine-3'-phosphate
  modified_base 11: mod_base = OTHER; note = 2'-deoxy-2'-fluorouridine-3'-phosphate
  modified_base 12: mod_base = OTHER; note = 2'-O-methyluridine-3'-phosphate
  modified_base 13: mod_base = OTHER; note = 2'-O-methylguanosine-3'-phosphate
  modified_base 14: mod_base = OTHER; note = 2'-O-methylguanosine-3'-phosphate
  modified_base 15: mod_base = OTHER; note = 2'-O-methylguanosine-3'-phosphate
  modified_base 16: mod_base = OTHER; note = 2'-O-methyladenosine-3'-phosphate
  modified_base 17: mod_base = OTHER; note = 2'-O-methyladenosine-3'-phosphate
  modified_base 18: mod_base = OTHER; note = 2'-O-methyluridine-3'-phosphate
  modified_base 19: mod_base = OTHER; note = 2'-O-methylguanosine-3'-phosphate
  modified_base 20: mod_base = OTHER; note = 2'-O-methyladenosine-3'-phosphate
  modified_base 21: mod_base = OTHER; note = 2'-O-methyladenosine
gattctgttattgggaatgaa

SEQ ID NO: 4392 - RNA, 21 nt, synthetic construct
  source 1..21: mol_type = other RNA
  modified_base 1: mod_base = OTHER; note = 2'-O-methyladenosine-3'-phosphate
  modified_base 2: mod_base = OTHER; note = 2'-O-methyluridine-3'-phosphate
  modified_base 3: mod_base = OTHER; note = 2'-O-methyluridine-3'-phosphate
  modified_base 4: mod_base = OTHER; note = 2'-O-methylcytidine-3'-phosphate
  modified_base 5: mod_base = OTHER; note = 2'-O-methyluridine-3'-phosphate
  modified_base 6: mod_base = OTHER; note = 2'-O-methylguanosine-3'-phosphate
  modified_base 7: mod_base = OTHER; note = 2'-deoxy-2'-fluorouridine-3'-phosphate
  modified_base 8: mod_base = OTHER; note = 2'-O-methyluridine-3'-phosphate
  modified_base 9: mod_base = OTHER; note = 2'-deoxy-2'-fluoroadenosine-3'-phosphate
  modified_base 10: mod_base = OTHER; note = 2'-deoxy-2'-fluorouridine-3'-phosphate
  modified_base 11: mod_base = OTHER; note = 2'-deoxy-2'-fluorouridine-3'-phosphate
  modified_base 12: mod_base = OTHER; note = 2'-O-methylguanosine-3'-phosphate
  modified_base 13: mod_base = OTHER; note = 2'-O-methylguanosine-3'-phosphate
  modified_base 14: mod_base = OTHER; note = 2'-O-methylguanosine-3'-phosphate
  modified_base 15: mod_base = OTHER; note = 2'-O-methyladenosine-3'-phosphate
  modified_base 16: mod_base = OTHER; note = 2'-O-methyladenosine-3'-phosphate
  modified_base 17: mod_base = OTHER; note = 2'-O-methyluridine-3'-phosphate
  modified_base 18: mod_base = OTHER; note = 2'-O-methylguanosine-3'-phosphate
  modified_base 19: mod_base = OTHER; note = 2'-O-methyladenosine-3'-phosphate
  modified_base 20: mod_base = OTHER; note = 2'-O-methyladenosine-3'-phosphate
  modified_base 21: mod_base = OTHER; note = 2'-O-methyladenosine
attctgttattgggaatgaaa

SEQ ID NO: 4393 - RNA, 21 nt, synthetic construct
  source 1..21: mol_type = other RNA
  modified_base 1: mod_base = OTHER; note = 2'-O-methyluridine-3'-phosphate
  modified_base 2: mod_base = OTHER; note = 2'-O-methyluridine-3'-phosphate
  modified_base 3: mod_base = OTHER; note = 2'-O-methylcytidine-3'-phosphate
  modified_base 4: mod_base = OTHER; note = 2'-O-methyluridine-3'-phosphate
  modified_base 5: mod_base = OTHER; note = 2'-O-methylguanosine-3'-phosphate
  modified_base 6: mod_base = OTHER; note = 2'-O-methyluridine-3'-phosphate
  modified_base 7: mod_base = OTHER; note = 2'-deoxy-2'-fluorouridine-3'-phosphate
  modified_base 8: mod_base = OTHER; note = 2'-O-methyladenosine-3'-phosphate
  modified_base 9: mod_base = OTHER; note = 2'-deoxy-2'-fluorouridine-3'-phosphate
  modified_base 10: mod_base = OTHER; note = 2'-deoxy-2'-fluorouridine-3'-phosphate
  modified_base 11: mod_base = OTHER; note = 2'-deoxy-2'-fluoroguanosine-3'-phosphate
  modified_base 12: mod_base = OTHER; note = 2'-O-methylguanosine-3'-phosphate
  modified_base 13: mod_base = OTHER; note = 2'-O-methylguanosine-3'-phosphate
  modified_base 14: mod_base = OTHER; note = 2'-O-methyladenosine-3'-phosphate
  modified_base 15: mod_base = OTHER; note = 2'-O-methyladenosine-3'-phosphate
  modified_base 16: mod_base = OTHER; note = 2'-O-methyluridine-3'-phosphate
  modified_base 17: mod_base = OTHER; note = 2'-O-methylguanosine-3'-phosphate
  modified_base 18: mod_base = OTHER; note = 2'-O-methyladenosine-3'-phosphate
  modified_base 19: mod_base = OTHER; note = 2'-O-methyladenosine-3'-phosphate
  modified_base 20: mod_base = OTHER; note = 2'-O-methyladenosine-3'-phosphate
  modified_base 21: mod_base = OTHER; note = 2'-O-methyladenosine
ttctgttattgggaatgaaaa

SEQ ID NO: 4394 - RNA, 21 nt, synthetic construct
  source 1..21: mol_type = other RNA
  modified_base 1: mod_base = OTHER; note = 2'-O-methyluridine-3'-phosphate
  modified_base 2: mod_base = OTHER; note = 2'-O-methylcytidine-3'-phosphate
  modified_base 3: mod_base = OTHER; note = 2'-O-methyluridine-3'-phosphate
  modified_base 4: mod_base = OTHER; note = 2'-O-methylguanosine-3'-phosphate
  modified_base 5: mod_base = OTHER; note = 2'-O-methyluridine-3'-phosphate
  modified_base 6: mod_base = OTHER; note = 2'-O-methyluridine-3'-phosphate
  modified_base 7: mod_base = OTHER; note = 2'-deoxy-2'-fluoroadenosine-3'-phosphate
  modified_base 8: mod_base = OTHER; note = 2'-O-methyluridine-3'-phosphate
  modified_base 9: mod_base = OTHER; note = 2'-deoxy-2'-fluorouridine-3'-phosphate
  modified_base 10: mod_base = OTHER; note = 2'-deoxy-2'-fluoroguanosine-3'-phosphate
  modified_base 11: mod_base = OTHER; note = 2'-deoxy-2'-fluoroguanosine-3'-phosphate
  modified_base 12: mod_base = OTHER; note = 2'-O-methylguanosine-3'-phosphate
  modified_base 13: mod_base = OTHER; note = 2'-O-methyladenosine-3'-phosphate
  modified_base 14: mod_base = OTHER; note = 2'-O-methyladenosine-3'-phosphate
  modified_base 15: mod_base = OTHER; note = 2'-O-methyluridine-3'-phosphate
  modified_base 16: mod_base = OTHER; note = 2'-O-methylguanosine-3'-phosphate
  modified_base 17: mod_base = OTHER; note = 2'-O-methyladenosine-3'-phosphate
  modified_base 18: mod_base = OTHER; note = 2'-O-methyladenosine-3'-phosphate
  modified_base 19: mod_base = OTHER; note = 2'-O-methyladenosine-3'-phosphate
  modified_base 20: mod_base = OTHER; note = 2'-O-methyluridine-3'-phosphate
  modified_base 21: mod_base = OTHER; note = 2'-O-methyladenosine
tctgttattgggaatgaaata

SEQ ID NO: 4395 - RNA, 21 nt, synthetic construct
  source 1..21: mol_type = other RNA
  modified_base 1: mod_base = OTHER; note = 2'-O-methylcytidine-3'-phosphate
  modified_base 2: mod_base = OTHER; note = 2'-O-methyluridine-3'-phosphate
  modified_base 3: mod_base = OTHER; note = 2'-O-methylguanosine-3'-phosphate
  modified_base 4: mod_base = OTHER; note = 2'-O-methyluridine-3'-phosphate
  modified_base 5: mod_base = OTHER; note = 2'-O-methyluridine-3'-phosphate
  modified_base 6: mod_base = OTHER; note = 2'-O-methyladenosine-3'-phosphate
  modified_base 7: mod_base = OTHER; note = 2'-deoxy-2'-fluorouridine-3'-phosphate
  modified_base 8: mod_base = OTHER; note = 2'-O-methyluridine-3'-phosphate
  modified_base 9: mod_base = OTHER; note = 2'-deoxy-2'-fluoroguanosine-3'-phosphate
  modified_base 10: mod_base = OTHER; note = 2'-deoxy-2'-fluoroguanosine-3'-phosphate
  modified_base 11: mod_base = OTHER; note = 2'-deoxy-2'-fluoroguanosine-3'-phosphate
  modified_base 12: mod_base = OTHER; note = 2'-O-methyladenosine-3'-phosphate
  modified_base 13: mod_base = OTHER; note = 2'-O-methyladenosine-3'-phosphate
  modified_base 14: mod_base = OTHER; note = 2'-O-methyluridine-3'-phosphate
  modified_base 15: mod_base = OTHER; note = 2'-O-methylguanosine-3'-phosphate
  modified_base 16: mod_base = OTHER; note = 2'-O-methyladenosine-3'-phosphate
  modified_base 17: mod_base = OTHER; note = 2'-O-methyladenosine-3'-phosphate
  modified_base 18: mod_base = OTHER; note = 2'-O-methyladenosine-3'-phosphate
  modified_base 19: mod_base = OTHER; note = 2'-O-methyluridine-3'-phosphate
  modified_base 20: mod_base = OTHER; note = 2'-O-methylcytidine-3'-phosphate
  modified_base 21: mod_base = OTHER; note = 2'-O-methyladenosine
ctgttattgggaatgaaatca

SEQ ID NO: 4396 - RNA, 21 nt, synthetic construct
  source 1..21: mol_type = other RNA
  modified_base 1: mod_base = OTHER; note = 2'-O-methyluridine-3'-phosphate
  modified_base 2: mod_base = OTHER; note = 2'-O-methylguanosine-3'-phosphate
  modified_base 3: mod_base = OTHER; note = 2'-O-methyluridine-3'-phosphate
  modified_base 4: mod_base = OTHER; note = 2'-O-methyluridine-3'-phosphate
  modified_base 5: mod_base = OTHER; note = 2'-O-methyladenosine-3'-phosphate
  modified_base 6: mod_base = OTHER; note = 2'-O-methyluridine-3'-phosphate
  modified_base 7: mod_base = OTHER; note = 2'-deoxy-2'-fluorouridine-3'-phosphate
  modified_base 8: mod_base = OTHER; note = 2'-O-methylguanosine-3'-phosphate
  modified_base 9: mod_base = OTHER; note = 2'-deoxy-2'-fluoroguanosine-3'-phosphate
  modified_base 10: mod_base = OTHER; note = 2'-deoxy-2'-fluoroguanosine-3'-phosphate
  modified_base 11: mod_base = OTHER; note = 2'-deoxy-2'-fluoroadenosine-3'-phosphate
  modified_base 12: mod_base = OTHER; note = 2'-O-methyladenosine-3'-phosphate
  modified_base 13: mod_base = OTHER; note = 2'-O-methyluridine-3'-phosphate
  modified_base 14: mod_base = OTHER; note = 2'-O-methylguanosine-3'-phosphate
  modified_base 15: mod_base = OTHER; note = 2'-O-methyladenosine-3'-phosphate
  modified_base 16: mod_base = OTHER; note = 2'-O-methyladenosine-3'-phosphate
  modified_base 17: mod_base = OTHER; note = 2'-O-methyladenosine-3'-phosphate
  modified_base 18: mod_base = OTHER; note = 2'-O-methyluridine-3'-phosphate
  modified_base 19: mod_base = OTHER; note = 2'-O-methylcytidine-3'-phosphate
  modified_base 20: mod_base = OTHER; note = 2'-O-methyluridine-3'-phosphate
  modified_base 21: mod_base = OTHER; note = 2'-O-methyladenosine
tgttattgggaatgaaatcta

SEQ ID NO: 4397 - RNA, 21 nt, synthetic construct
  source 1..21: mol_type = other RNA
  modified_base 1: mod_base = OTHER; note = 2'-O-methylguanosine-3'-phosphate
  modified_base 2: mod_base = OTHER; note = 2'-O-methyluridine-3'-phosphate
  modified_base 3: mod_base = OTHER; note = 2'-O-methyluridine-3'-phosphate
  modified_base 4: mod_base = OTHER; note = 2'-O-methyladenosine-3'-phosphate
  modified_base 5: mod_base = OTHER; note = 2'-O-methyluridine-3'-phosphate
  modified_base 6: mod_base = OTHER; note = 2'-O-methyluridine-3'-phosphate
  modified_base 7: mod_base = OTHER; note = 2'-deoxy-2'-fluoroguanosine-3'-phosphate
  modified_base 8: mod_base = OTHER; note = 2'-O-methylguanosine-3'-phosphate
  modified_base 9: mod_base = OTHER; note = 2'-deoxy-2'-fluoroguanosine-3'-phosphate
  modified_base 10: mod_base = OTHER; note = 2'-deoxy-2'-fluoroadenosine-3'-phosphate
  modified_base 11: mod_base = OTHER; note = 2'-deoxy-2'-fluoroadenosine-3'-phosphate
  modified_base 12: mod_base = OTHER; note = 2'-O-methyluridine-3'-phosphate
  modified_base 13: mod_base = OTHER; note = 2'-O-methylguanosine-3'-phosphate
  modified_base 14: mod_base = OTHER; note = 2'-O-methyladenosine-3'-phosphate
  modified_base 15: mod_base = OTHER; note = 2'-O-methyladenosine-3'-phosphate
  modified_base 16: mod_base = OTHER; note = 2'-O-methyladenosine-3'-phosphate
  modified_base 17: mod_base = OTHER; note = 2'-O-methyluridine-3'-phosphate
  modified_base 18: mod_base = OTHER; note = 2'-O-methylcytidine-3'-phosphate
  modified_base 19: mod_base = OTHER; note = 2'-O-methyluridine-3'-phosphate
  modified_base 20: mod_base = OTHER; note = 2'-O-methylguanosine-3'-phosphate
  modified_base 21: mod_base = OTHER; note = 2'-O-methyladenosine
gttattgggaatgaaatctga

SEQ ID NO: 4398 - RNA, 21 nt, synthetic construct
  source 1..21: mol_type = other RNA
  modified_base 1: mod_base = OTHER; note = 2'-O-methyluridine-3'-phosphate
  modified_base 2: mod_base = OTHER; note = 2'-O-methyluridine-3'-phosphate
  modified_base 3: mod_base = OTHER; note = 2'-O-methyladenosine-3'-phosphate
  modified_base 4: mod_base = OTHER; note = 2'-O-methyluridine-3'-phosphate
  modified_base 5: mod_base = OTHER; note = 2'-O-methyluridine-3'-phosphate
  modified_base 6: mod_base = OTHER; note = 2'-O-methylguanosine-3'-phosphate
  modified_base 7: mod_base = OTHER; note = 2'-deoxy-2'-fluoroguanosine-3'-phosphate
  modified_base 8: mod_base = OTHER; note = 2'-O-methylguanosine-3'-phosphate
  modified_base 9: mod_base = OTHER; note = 2'-deoxy-2'-fluoroadenosine-3'-phosphate
  modified_base 10: mod_base = OTHER; note = 2'-deoxy-2'-fluoroadenosine-3'-phosphate
  modified_base 11: mod_base = OTHER; note = 2'-deoxy-2'-fluorouridine-3'-phosphate
  modified_base 12: mod_base = OTHER; note = 2'-O-methylguanosine-3'-phosphate
  modified_base 13: mod_base = OTHER; note = 2'-O-methyladenosine-3'-phosphate
  modified_base 14: mod_base = OTHER; note = 2'-O-methyladenosine-3'-phosphate
  modified_base 15: mod_base = OTHER; note = 2'-O-methyladenosine-3'-phosphate
  modified_base 16: mod_base = OTHER; note = 2'-O-methyluridine-3'-phosphate
  modified_base 17: mod_base = OTHER; note = 2'-O-methylcytidine-3'-phosphate
  modified_base 18: mod_base = OTHER; note = 2'-O-methyluridine-3'-phosphate
  modified_base 19: mod_base = OTHER; note = 2'-O-methylguanosine-3'-phosphate
  modified_base 20: mod_base = OTHER; note = 2'-O-methyluridine-3'-phosphate
  modified_base 21: mod_base = OTHER; note = 2'-O-methyladenosine
ttattgggaatgaaatctgta

SEQ ID NO: 4399 - RNA, 21 nt, synthetic construct
  source 1..21: mol_type = other RNA
  modified_base 1: mod_base = OTHER; note = 2'-O-methyladenosine-3'-phosphate
  modified_base 2: mod_base = OTHER; note = 2'-O-methyluridine-3'-phosphate
  modified_base 3: mod_base = OTHER; note = 2'-O-methyluridine-3'-phosphate
  modified_base 4: mod_base = OTHER; note = 2'-O-methylguanosine-3'-phosphate
  modified_base 5: mod_base = OTHER; note = 2'-O-methylguanosine-3'-phosphate
  modified_base 6: mod_base = OTHER; note = 2'-O-methylguanosine-3'-phosphate
  modified_base 7: mod_base = OTHER; note = 2'-deoxy-2'-fluoroadenosine-3'-phosphate
  modified_base 8: mod_base = OTHER; note = 2'-O-methyladenosine-3'-phosphate
  modified_base 9: mod_base = OTHER; note = 2'-deoxy-2'-fluorouridine-3'-phosphate
  modified_base 10: mod_base = OTHER; note = 2'-deoxy-2'-fluoroguanosine-3'-phosphate
  modified_base 11: mod_base = OTHER; note = 2'-deoxy-2'-fluoroadenosine-3'-phosphate
  modified_base 12: mod_base = OTHER; note = 2'-O-methyladenosine-3'-phosphate
  modified_base 13: mod_base = OTHER; note = 2'-O-methyladenosine-3'-phosphate
  modified_base 14: mod_base = OTHER; note = 2'-O-methyluridine-3'-phosphate
  modified_base 15: mod_base = OTHER; note = 2'-O-methylcytidine-3'-phosphate
  modified_base 16: mod_base = OTHER; note = 2'-O-methyluridine-3'-phosphate
  modified_base 17: mod_base = OTHER; note = 2'-O-methylguanosine-3'-phosphate
  modified_base 18: mod_base = OTHER; note = 2'-O-methyluridine-3'-phosphate
  modified_base 19: mod_base = OTHER; note = 2'-O-methylcytidine-3'-phosphate
  modified_base 20: mod_base = OTHER; note = 2'-O-methyladenosine-3'-phosphate
  modified_base 21: mod_base = OTHER; note = 2'-O-methyladenosine
attgggaatgaaatctgtcaa

SEQ ID NO: 4400 - RNA, 21 nt, synthetic construct
  source 1..21: mol_type = other RNA
  modified_base 1: mod_base = OTHER; note = 2'-O-methyladenosine-3'-phosphate
  modified_base 2: mod_base = OTHER; note = 2'-O-methylguanosine-3'-phosphate
  modified_base 3: mod_base = OTHER; note = 2'-O-methyladenosine-3'-phosphate
  modified_base 4: mod_base = OTHER; note = 2'-O-methylguanosine-3'-phosphate
  modified_base 5: mod_base = OTHER; note = 2'-O-methylcytidine-3'-phosphate
  modified_base 6: mod_base = OTHER; note = 2'-O-methyluridine-3'-phosphate
  modified_base 7: mod_base = OTHER; note = 2'-deoxy-2'-fluoroguanosine-3'-phosphate
  modified_base 8: mod_base = OTHER; note = 2'-O-methyluridine-3'-phosphate
  modified_base 9: mod_base = OTHER; note = 2'-deoxy-2'-fluoroadenosine-3'-phosphate
  modified_base 10: mod_base = OTHER; note = 2'-deoxy-2'-fluorouridine-3'-phosphate
  modified_base 11: mod_base = OTHER; note = 2'-deoxy-2'-fluoroadenosine-3'-phosphate
  modified_base 12: mod_base = OTHER; note = 2'-O-methyluridine-3'-phosphate
  modified_base 13: mod_base = OTHER; note = 2'-O-methylguanosine-3'-phosphate
  modified_base 14: mod_base = OTHER; note = 2'-O-methyladenosine-3'-phosphate
  modified_base 15: mod_base = OTHER; note = 2'-O-methyluridine-3'-phosphate
  modified_base 16: mod_base = OTHER; note = 2'-O-methylguanosine-3'-phosphate
  modified_base 17: mod_base = OTHER; note = 2'-O-methylguanosine-3'-phosphate
  modified_base 18: mod_base = OTHER; note = 2'-O-methyladenosine-3'-phosphate
  modified_base 19: mod_base = OTHER; note = 2'-O-methylguanosine-3'-phosphate
  modified_base 20: mod_base = OTHER; note = 2'-O-methyluridine-3'-phosphate
  modified_base 21: mod_base = OTHER; note = 2'-O-methyladenosine
agagctgtatatgatggagta

SEQ ID NO: 4401 - RNA, 21 nt, synthetic construct
  source 1..21: mol_type = other RNA
  modified_base 1: mod_base = OTHER; note = 2'-O-methylguanosine-3'-phosphate
  modified_base 2: mod_base = OTHER; note = 2'-O-methylcytidine-3'-phosphate
  modified_base 3: mod_base = OTHER; note = 2'-O-methyluridine-3'-phosphate
  modified_base 4: mod_base = OTHER; note = 2'-O-methylguanosine-3'-phosphate
  modified_base 5: mod_base = OTHER; note = 2'-O-methyluridine-3'-phosphate
  modified_base 6: mod_base = OTHER; note = 2'-O-methyladenosine-3'-phosphate
  modified_base 7: mod_base = OTHER; note = 2'-deoxy-2'-fluorouridine-3'-phosphate
  modified_base 8: mod_base = OTHER; note = 2'-O-methyladenosine-3'-phosphate
  modified_base 9: mod_base = OTHER; note = 2'-deoxy-2'-fluorouridine-3'-phosphate
  modified_base 10: mod_base = OTHER; note = 2'-deoxy-2'-fluoroguanosine-3'-phosphate
  modified_base 11: mod_base = OTHER; note = 2'-deoxy-2'-fluoroadenosine-3'-phosphate
  modified_base 12: mod_base = OTHER; note = 2'-O-methyluridine-3'-phosphate
  modified_base 13: mod_base = OTHER; note = 2'-O-methylguanosine-3'-phosphate
  modified_base 14: mod_base = OTHER; note = 2'-O-methylguanosine-3'-phosphate
  modified_base 15: mod_base = OTHER; note = 2'-O-methyladenosine-3'-phosphate
  modified_base 16: mod_base = OTHER; note = 2'-O-methylguanosine-3'-phosphate
  modified_base 17: mod_base = OTHER; note = 2'-O-methyluridine-3'-phosphate
  modified_base 18: mod_base = OTHER; note = 2'-O-methylguanosine-3'-phosphate
  modified_base 19: mod_base = OTHER; note = 2'-O-methyladenosine-3'-phosphate
  modified_base 20: mod_base = OTHER; note = 2'-O-methyladenosine-3'-phosphate
  modified_base 21: mod_base = OTHER; note = 2'-O-methyladenosine
gctgtatatgatggagtgaaa

SEQ ID NO: 4402 - RNA, 21 nt, synthetic construct
  source 1..21: mol_type = other RNA
  modified_base 1: mod_base = OTHER; note = 2'-O-methylguanosine-3'-phosphate
  modified_base 2: mod_base = OTHER; note = 2'-O-methylguanosine-3'-phosphate
  modified_base 3: mod_base = OTHER; note = 2'-O-methyladenosine-3'-phosphate
  modified_base 4: mod_base = OTHER; note = 2'-O-methyluridine-3'-phosphate
  modified_base 5: mod_base = OTHER; note = 2'-O-methylguanosine-3'-phosphate
  modified_base 6: mod_base = OTHER; note = 2'-O-methyluridine-3'-phosphate
  modified_base 7: mod_base = OTHER; note = 2'-deoxy-2'-fluoroguanosine-3'-phosphate
  modified_base 8: mod_base = OTHER; note = 2'-O-methyluridine-3'-phosphate
  modified_base 9: mod_base = OTHER; note = 2'-deoxy-2'-fluoroadenosine-3'-phosphate
  modified_base 10: mod_base = OTHER; note = 2'-deoxy-2'-fluoroadenosine-3'-phosphate
  modified_base 11: mod_base = OTHER; note = 2'-deoxy-2'-fluorocytidine-3'-phosphate
  modified_base 12: mod_base = OTHER; note = 2'-O-methyladenosine-3'-phosphate
  modified_base 13: mod_base = OTHER; note = 2'-O-methylcytidine-3'-phosphate
  modified_base 14: mod_base = OTHER; note = 2'-O-methyladenosine-3'-phosphate
  modified_base 15: mod_base = OTHER; note = 2'-O-methyladenosine-3'-phosphate
  modified_base 16: mod_base = OTHER; note = 2'-O-methylguanosine-3'-phosphate
  modified_base 17: mod_base = OTHER; note = 2'-O-methyladenosine-3'-phosphate
  modified_base 18: mod_base = OTHER; note = 2'-O-methylcytidine-3'-phosphate
  modified_base 19: mod_base = OTHER; note = 2'-O-methylcytidine-3'-phosphate
  modified_base 20: mod_base = OTHER; note = 2'-O-methyladenosine-3'-phosphate
  modified_base 21: mod_base = OTHER; note = 2'-O-methyladenosine
ggatgtgtaacacaagaccaa

SEQ ID NO: 4403 - RNA, 21 nt, synthetic construct
  source 1..21: mol_type = other RNA
  modified_base 1: mod_base = OTHER; note = 2'-O-methylguanosine-3'-phosphate
  modified_base 2: mod_base = OTHER; note = 2'-O-methyladenosine-3'-phosphate
  modified_base 3: mod_base = OTHER; note = 2'-O-methyluridine-3'-phosphate
  modified_base 4: mod_base = OTHER; note = 2'-O-methylguanosine-3'-phosphate
  modified_base 5: mod_base = OTHER; note = 2'-O-methyluridine-3'-phosphate
  modified_base 6: mod_base = OTHER; note = 2'-O-methylguanosine-3'-phosphate
  modified_base 7: mod_base = OTHER; note = 2'-deoxy-2'-fluorouridine-3'-phosphate
  modified_base 8: mod_base = OTHER; note = 2'-O-methyladenosine-3'-phosphate
  modified_base 9: mod_base = OTHER; note = 2'-deoxy-2'-fluoroadenosine-3'-phosphate
  modified_base 10: mod_base = OTHER; note = 2'-deoxy-2'-fluorocytidine-3'-phosphate
  modified_base 11: mod_base = OTHER; note = 2'-deoxy-2'-fluoroadenosine-3'-phosphate
  modified_base 12: mod_base = OTHER; note = 2'-O-methylcytidine-3'-phosphate
  modified_base 13: mod_base = OTHER; note = 2'-O-methyladenosine-3'-phosphate
  modified_base 14: mod_base = OTHER; note = 2'-O-methyladenosine-3'-phosphate
  modified_base 15: mod_base = OTHER; note = 2'-O-methylguanosine-3'-phosphate
  modified_base 16: mod_base = OTHER; note = 2'-O-methyladenosine-3'-phosphate
  modified_base 17: mod_base = OTHER; note = 2'-O-methylcytidine-3'-phosphate
  modified_base 18: mod_base = OTHER; note = 2'-O-methylcytidine-3'-phosphate
  modified_base 19: mod_base = OTHER; note = 2'-O-methyladenosine-3'-phosphate
  modified_base 20: mod_base = OTHER; note = 2'-O-methyladenosine-3'-phosphate
  modified_base 21: mod_base = OTHER; note = 2'-O-methyladenosine
gatgtgtaacacaagaccaaa

SEQ ID NO: 4404 - RNA, 21 nt, synthetic construct
  source 1..21: mol_type = other RNA
  modified_base 1: mod_base = OTHER; note = 2'-O-methylguanosine-3'-phosphate
  modified_base 2: mod_base = OTHER; note = 2'-O-methyluridine-3'-phosphate
  modified_base 3: mod_base = OTHER; note = 2'-O-methylguanosine-3'-phosphate
  modified_base 4: mod_base = OTHER; note = 2'-O-methyluridine-3'-phosphate
  modified_base 5: mod_base = OTHER; note = 2'-O-methyladenosine-3'-phosphate
  modified_base 6: mod_base = OTHER; note = 2'-O-methyladenosine-3'-phosphate
  modified_base 7: mod_base = OTHER; note = 2'-deoxy-2'-fluorocytidine-3'-phosphate
  modified_base 8: mod_base = OTHER; note = 2'-O-methyladenosine-3'-phosphate
  modified_base 9: mod_base = OTHER; note = 2'-deoxy-2'-fluorocytidine-3'-phosphate
  modified_base 10: mod_base = OTHER; note = 2'-deoxy-2'-fluoroadenosine-3'-phosphate
  modified_base 11: mod_base = OTHER; note = 2'-deoxy-2'-fluoroadenosine-3'-phosphate
  modified_base 12: mod_base = OTHER; note = 2'-O-methylguanosine-3'-phosphate
  modified_base 13: mod_base = OTHER; note = 2'-O-methyladenosine-3'-phosphate
  modified_base 14: mod_base = OTHER; note = 2'-O-methylcytidine-3'-phosphate
  modified_base 15: mod_base = OTHER; note = 2'-O-methylcytidine-3'-phosphate
  modified_base 16: mod_base = OTHER; note = 2'-O-methyladenosine-3'-phosphate
  modified_base 17: mod_base = OTHER; note = 2'-O-methyladenosine-3'-phosphate
  modified_base 18: mod_base = OTHER; note = 2'-O-methylcytidine-3'-phosphate
  modified_base 19: mod_base = OTHER; note = 2'-O-methyluridine-3'-phosphate
  modified_base 20: mod_base = OTHER; note = 2'-O-methylguanosine-3'-phosphate
  modified_base 21: mod_base = OTHER; note = 2'-O-methyladenosine
gtgtaacacaagaccaactga

SEQ ID NO: 4405 - RNA, 21 nt, synthetic construct
  source 1..21: mol_type = other RNA
  modified_base 1: mod_base = OTHER; note = 2'-O-methyluridine-3'-phosphate
  modified_base 2: mod_base = OTHER; note = 2'-O-methylguanosine-3'-phosphate
  modified_base 3: mod_base = OTHER; note = 2'-O-methyluridine-3'-phosphate
  modified_base 4: mod_base = OTHER; note = 2'-O-methyladenosine-3'-phosphate
  modified_base 5: mod_base = OTHER; note = 2'-O-methyladenosine-3'-phosphate
  modified_base 6: mod_base = OTHER; note = 2'-O-methylcytidine-3'-phosphate
  modified_base 7: mod_base = OTHER; note = 2'-deoxy-2'-fluoroadenosine-3'-phosphate
  modified_base 8: mod_base = OTHER; note = 2'-O-methylcytidine-3'-phosphate
  modified_base 9: mod_base = OTHER; note = 2'-deoxy-2'-fluoroadenosine-3'-phosphate
  modified_base 10: mod_base = OTHER; note = 2'-deoxy-2'-fluoroadenosine-3'-phosphate
  modified_base 11: mod_base = OTHER; note = 2'-deoxy-2'-fluoroguanosine-3'-phosphate
  modified_base 12: mod_base = OTHER; note = 2'-O-methyladenosine-3'-phosphate
  modified_base 13: mod_base = OTHER; note = 2'-O-methylcytidine-3'-phosphate
  modified_base 14: mod_base = OTHER; note = 2'-O-methylcytidine-3'-phosphate
  modified_base 15: mod_base = OTHER; note = 2'-O-methyladenosine-3'-phosphate
  modified_base 16: mod_base = OTHER; note = 2'-O-methyladenosine-3'-phosphate
  modified_base 17: mod_base = OTHER; note = 2'-O-methylcytidine-3'-phosphate
  modified_base 18: mod_base = OTHER; note = 2'-O-methyluridine-3'-phosphate
  modified_base 19: mod_base = OTHER; note = 2'-O-methylguanosine-3'-phosphate
  modified_base 20: mod_base = OTHER; note = 2'-O-methyladenosine-3'-phosphate
  modified_base 21: mod_base = OTHER; note = 2'-O-methyladenosine
tgtaacacaagaccaactgaa

SEQ ID NO: 4406 - RNA, 21 nt, synthetic construct
  source 1..21: mol_type = other RNA
  modified_base 1: mod_base = OTHER; note = 2'-O-methyluridine-3'-phosphate
  modified_base 2: mod_base = OTHER; note = 2'-O-methyladenosine-3'-phosphate
  modified_base 3: mod_base = OTHER; note = 2'-O-methyladenosine-3'-phosphate
  modified_base 4: mod_base = OTHER; note = 2'-O-methylcytidine-3'-phosphate
  modified_base 5: mod_base = OTHER; note = 2'-O-methyladenosine-3'-phosphate
  modified_base 6: mod_base = OTHER; note = 2'-O-methylcytidine-3'-phosphate
  modified_base 7: mod_base = OTHER; note = 2'-deoxy-2'-fluoroadenosine-3'-phosphate
  modified_base 8: mod_base = OTHER; note = 2'-O-methyladenosine-3'-phosphate
  modified_base 9: mod_base = OTHER; note = 2'-deoxy-2'-fluoroguanosine-3'-phosphate
  modified_base 10: mod_base = OTHER; note = 2'-deoxy-2'-fluoroadenosine-3'-phosphate
  modified_base 11: mod_base = OTHER; note = 2'-deoxy-2'-fluorocytidine-3'-phosphate
  modified_base 12: mod_base = OTHER; note = 2'-O-methylcytidine-3'-phosphate
  modified_base 13: mod_base = OTHER; note = 2'-O-methyladenosine-3'-phosphate
  modified_base 14: mod_base = OTHER; note = 2'-O-methyladenosine-3'-phosphate
  modified_base 15: mod_base = OTHER; note = 2'-O-methylcytidine-3'-phosphate
  modified_base 16: mod_base = OTHER; note = 2'-O-methyluridine-3'-phosphate
  modified_base 17: mod_base = OTHER; note = 2'-O-methylguanosine-3'-phosphate
  modified_base 18: mod_base = OTHER; note = 2'-O-methyladenosine-3'-phosphate
  modified_base 19: mod_base = OTHER; note = 2'-O-methylguanosine-3'-phosphate
  modified_base 20: mod_base = OTHER; note = 2'-O-methyladenosine-3'-phosphate
  modified_base 21: mod_base = OTHER; note = 2'-O-methyladenosine
taacacaagaccaactgagaa

SEQ ID NO: 4407 - RNA, 21 nt, synthetic construct
  source 1..21: mol_type = other RNA
  modified_base 1: mod_base = OTHER; note = 2'-O-methyladenosine-3'-phosphate
  modified_base 2: mod_base = OTHER; note = 2'-O-methyladenosine-3'-phosphate
  modified_base 3: mod_base = OTHER; note = 2'-O-methylcytidine-3'-phosphate
  modified_base 4: mod_base = OTHER; note = 2'-O-methyluridine-3'-phosphate
  modified_base 5: mod_base = OTHER; note = 2'-O-methylguanosine-3'-phosphate
  modified_base 6: mod_base = OTHER; note = 2'-O-methyladenosine-3'-phosphate
  modified_base 7: mod_base = OTHER; note = 2'-deoxy-2'-fluoroguanosine-3'-phosphate
  modified_base 8: mod_base = OTHER; note = 2'-O-methyladenosine-3'-phosphate
  modified_base 9: mod_base = OTHER; note = 2'-deoxy-2'-fluoroguanosine-3'-phosphate
  modified_base 10: mod_base = OTHER; note = 2'-deoxy-2'-fluorouridine-3'-phosphate
  modified_base 11: mod_base = OTHER; note = 2'-deoxy-2'-fluorocytidine-3'-phosphate
  modified_base 12: mod_base = OTHER; note = 2'-O-methyluridine-3'-phosphate
  modified_base 13: mod_base = OTHER; note = 2'-O-methylguanosine-3'-phosphate
  modified_base 14: mod_base = OTHER; note = 2'-O-methyladenosine-3'-phosphate
  modified_base 15: mod_base = OTHER; note = 2'-O-methyladenosine-3'-phosphate
  modified_base 16: mod_base = OTHER; note = 2'-O-methyluridine-3'-phosphate
  modified_base 17: mod_base = OTHER; note = 2'-O-methylguanosine-3'-phosphate
  modified_base 18: mod_base = OTHER; note = 2'-O-methyluridine-3'-phosphate
  modified_base 19: mod_base = OTHER; note = 2'-O-methyluridine-3'-phosphate
  modified_base 20: mod_base = OTHER; note = 2'-O-methyladenosine-3'-phosphate
  modified_base 21: mod_base = OTHER; note = 2'-O-methyladenosine
aactgagagtctgaatgttaa

SEQ ID NO: 4408 - RNA, 21 nt, synthetic construct
  source 1..21: mol_type = other RNA
  modified_base 1: mod_base = OTHER; note = 2'-O-methyladenosine-3'-phosphate
  modified_base 2: mod_base = OTHER; note = 2'-O-methylcytidine-3'-phosphate
  modified_base 3: mod_base = OTHER; note = 2'-O-methyluridine-3'-phosphate
  modified_base 4: mod_base = OTHER; note = 2'-O-methylguanosine-3'-phosphate
  modified_base 5: mod_base = OTHER; note = 2'-O-methyladenosine-3'-phosphate
  modified_base 6: mod_base = OTHER; note = 2'-O-methylguanosine-3'-phosphate
  modified_base 7: mod_base = OTHER; note = 2'-deoxy-2'-fluoroadenosine-3'-phosphate
  modified_base 8: mod_base = OTHER; note = 2'-O-methylguanosine-3'-phosphate
  modified_base 9: mod_base = OTHER; note = 2'-deoxy-2'-fluorouridine-3'-phosphate
  modified_base 10: mod_base = OTHER; note = 2'-deoxy-2'-fluorocytidine-3'-phosphate
  modified_base 11: mod_base = OTHER; note = 2'-deoxy-2'-fluorouridine-3'-phosphate
  modified_base 12: mod_base = OTHER; note = 2'-O-methylguanosine-3'-phosphate
  modified_base 13: mod_base = OTHER; note = 2'-O-methyladenosine-3'-phosphate
  modified_base 14: mod_base = OTHER; note = 2'-O-methyladenosine-3'-phosphate
  modified_base 15: mod_base = OTHER; note = 2'-O-methyluridine-3'-phosphate
  modified_base 16: mod_base = OTHER; note = 2'-O-methylguanosine-3'-phosphate
  modified_base 17: mod_base = OTHER; note = 2'-O-methyluridine-3'-phosphate
  modified_base 18: mod_base = OTHER; note = 2'-O-methyluridine-3'-phosphate
  modified_base 19: mod_base = OTHER; note = 2'-O-methyladenosine-3'-phosphate
  modified_base 20: mod_base = OTHER; note = 2'-O-methyluridine-3'-phosphate
  modified_base 21: mod_base = OTHER; note = 2'-O-methyladenosine
actgagagtctgaatgttata

SEQ ID NO: 4409 - RNA, 21 nt, synthetic construct
  source 1..21: mol_type = other RNA
  modified_base 1: mod_base = OTHER; note = 2'-O-methylcytidine-3'-phosphate
  modified_base 2: mod_base = OTHER; note = 2'-O-methyluridine-3'-phosphate
  modified_base 3: mod_base = OTHER; note = 2'-O-methylguanosine-3'-phosphate
  modified_base 4: mod_base = OTHER; note = 2'-O-methyladenosine-3'-phosphate
  modified_base 5: mod_base = OTHER; note = 2'-O-methylguanosine-3'-phosphate
  modified_base 6: mod_base = OTHER; note = 2'-O-methyladenosine-3'-phosphate
  modified_base 7: mod_base = OTHER; note = 2'-deoxy-2'-fluoroguanosine-3'-phosphate
  modified_base 8: mod_base = OTHER; note = 2'-O-methyluridine-3'-phosphate
  modified_base 9: mod_base = OTHER; note = 2'-deoxy-2'-fluorocytidine-3'-phosphate
  modified_base 10: mod_base = OTHER; note = 2'-deoxy-2'-fluorouridine-3'-phosphate
  modified_base 11: mod_base = OTHER; note = 2'-deoxy-2'-fluoroguanosine-3'-phosphate
  modified_base 12: mod_base = OTHER; note = 2'-O-methyladenosine-3'-phosphate
  modified_base 13: mod_base = OTHER; note = 2'-O-methyladenosine-3'-phosphate
  modified_base 14: mod_base = OTHER; note = 2'-O-methyluridine-3'-phosphate
  modified_base 15: mod_base = OTHER; note = 2'-O-methylguanosine-3'-phosphate
  modified_base 16: mod_base = OTHER; note = 2'-O-methyluridine-3'-phosphate
  modified_base 17: mod_base = OTHER; note = 2'-O-methyluridine-3'-phosphate
  modified_base 18: mod_base = OTHER; note = 2'-O-methyladenosine-3'-phosphate
  modified_base 19: mod_base = OTHER; note = 2'-O-methyluridine-3'-phosphate
  modified_base 20: mod_base = OTHER; note = 2'-O-methyluridine-3'-phosphate
  modified_base 21: mod_base = OTHER; note = 2'-O-methyladenosine
ctgagagtctgaatgttatta

SEQ ID NO: 4410 - RNA, 21 nt, synthetic construct
  source 1..21: mol_type = other RNA
  modified_base 1: mod_base = OTHER; note = 2'-O-methylguanosine-3'-phosphate
  modified_base 2: mod_base = OTHER; note = 2'-O-methyladenosine-3'-phosphate
  modified_base 3: mod_base = OTHER; note = 2'-O-methylguanosine-3'-phosphate
  modified_base 4: mod_base = OTHER; note = 2'-O-methyladenosine-3'-phosphate
  modified_base 5: mod_base = OTHER; note = 2'-O-methylguanosine-3'-phosphate
  modified_base 6: mod_base = OTHER; note = 2'-O-methyluridine-3'-phosphate
  modified_base 7: mod_base = OTHER; note = 2'-deoxy-2'-fluorocytidine-3'-phosphate
  modified_base 8: mod_base = OTHER; note = 2'-O-methyluridine-3'-phosphate
  modified_base 9: mod_base = OTHER; note = 2'-deoxy-2'-fluoroguanosine-3'-phosphate
  modified_base 10: mod_base = OTHER; note = 2'-deoxy-2'-fluoroadenosine-3'-phosphate
  modified_base 11: mod_base = OTHER; note = 2'-deoxy-2'-fluoroadenosine-3'-phosphate
  modified_base 12: mod_base = OTHER; note = 2'-O-methyluridine-3'-phosphate
  modified_base 13: mod_base = OTHER; note = 2'-O-methylguanosine-3'-phosphate
  modified_base 14: mod_base = OTHER; note = 2'-O-methyluridine-3'-phosphate
  modified_base 15: mod_base = OTHER; note = 2'-O-methyluridine-3'-phosphate
  modified_base 16: mod_base = OTHER; note = 2'-O-methyladenosine-3'-phosphate
  modified_base 17: mod_base = OTHER; note = 2'-O-methyluridine-3'-phosphate
  modified_base 18: mod_base = OTHER; note = 2'-O-methyluridine-3'-phosphate
  modified_base 19: mod_base = OTHER; note = 2'-O-methylcytidine-3'-phosphate
  modified_base 20: mod_base = OTHER; note = 2'-O-methyluridine-3'-phosphate
  modified_base 21: mod_base = OTHER; note = 2'-O-methyladenosine
gagagtctgaatgttattcta

SEQ ID NO: 4411 - RNA, 21 nt, synthetic construct
  source 1..21: mol_type = other RNA
  modified_base 1: mod_base = OTHER; note = 2'-O-methylguanosine-3'-phosphate
  modified_base 2: mod_base = OTHER; note = 2'-O-methyladenosine-3'-phosphate
  modified_base 3: mod_base = OTHER; note = 2'-O-methylguanosine-3'-phosphate
  modified_base 4: mod_base = OTHER; note = 2'-O-methyluridine-3'-phosphate
  modified_base 5: mod_base = OTHER; note = 2'-O-methylcytidine-3'-phosphate
  modified_base 6: mod_base = OTHER; note = 2'-O-methyluridine-3'-phosphate
  modified_base 7: mod_base = OTHER; note = 2'-deoxy-2'-fluoroguanosine-3'-phosphate
  modified_base 8: mod_base = OTHER; note = 2'-O-methyladenosine-3'-phosphate
  modified_base 9: mod_base = OTHER; note = 2'-deoxy-2'-fluoroadenosine-3'-phosphate
  modified_base 10: mod_base = OTHER; note = 2'-deoxy-2'-fluorouridine-3'-phosphate
  modified_base 11: mod_base = OTHER; note = 2'-deoxy-2'-fluoroguanosine-3'-phosphate
  modified_base 12: mod_base = OTHER; note = 2'-O-methyluridine-3'-phosphate
  modified_base 13: mod_base = OTHER; note = 2'-O-methyluridine-3'-phosphate
  modified_base 14: mod_base = OTHER; note = 2'-O-methyladenosine-3'-phosphate
  modified_base 15: mod_base = OTHER; note = 2'-O-methyluridine-3'-phosphate
  modified_base 16: mod_base = OTHER; note = 2'-O-methyluridine-3'-phosphate
  modified_base 17: mod_base = OTHER; note = 2'-O-methylcytidine-3'-phosphate
  modified_base 18: mod_base = OTHER; note = 2'-O-methyluridine-3'-phosphate
  modified_base 19: mod_base = OTHER; note = 2'-O-methylguanosine-3'-phosphate
  modified_base 20: mod_base = OTHER; note = 2'-O-methylguanosine-3'-phosphate
  modified_base 21: mod_base = OTHER; note = 2'-O-methyladenosine
gagtctgaatgttattctgga

SEQ ID NO: 4412 - RNA, 21 nt, synthetic construct
  source 1..21: mol_type = other RNA
  modified_base 1: mod_base = OTHER; note = 2'-O-methyluridine-3'-phosphate
  modified_base 2: mod_base = OTHER; note = 2'-O-methylguanosine-3'-phosphate
  modified_base 3: mod_base = OTHER; note = 2'-O-methylcytidine-3'-phosphate
  modified_base 4: mod_base = OTHER; note = 2'-O-methylcytidine-3'-phosphate
  modified_base 5: mod_base = OTHER; note = 2'-O-methyladenosine-3'-phosphate
  modified_base 6: mod_base = OTHER; note = 2'-O-methyladenosine-3'-phosphate
  modified_base 7: mod_base = OTHER; note = 2'-deoxy-2'-fluoroguanosine-3'-phosphate
  modified_base 8: mod_base = OTHER; note = 2'-O-methyladenosine-3'-phosphate
  modified_base 9: mod_base = OTHER; note = 2'-deoxy-2'-fluoroguanosine-3'-phosphate
  modified_base 10: mod_base = OTHER; note = 2'-deoxy-2'-fluorocytidine-3'-phosphate
  modified_base 11: mod_base = OTHER; note = 2'-deoxy-2'-fluoroadenosine-3'-phosphate
  modified_base 12: mod_base = OTHER; note = 2'-O-methyluridine-3'-phosphate
  modified_base 13: mod_base = OTHER; note = 2'-O-methylguanosine-3'-phosphate
  modified_base 14: mod_base = OTHER; note = 2'-O-methyluridine-3'-phosphate
  modified_base 15: mod_base = OTHER; note = 2'-O-methyladenosine-3'-phosphate
  modified_base 16: mod_base = OTHER; note = 2'-O-methyladenosine-3'-phosphate
  modified_base 17: mod_base = OTHER; note = 2'-O-methyladenosine-3'-phosphate
  modified_base 18: mod_base = OTHER; note = 2'-O-methyluridine-3'-phosphate
  modified_base 19: mod_base = OTHER; note = 2'-O-methylguanosine-3'-phosphate
  modified_base 20: mod_base = OTHER; note = 2'-O-methyladenosine-3'-phosphate
  modified_base 21: mod_base = OTHER; note = 2'-O-methyladenosine
tgccaagagcatgtaaatgaa

SEQ ID NO: 4413 - RNA, 21 nt, synthetic construct
  source 1..21: mol_type = other RNA
  modified_base 1: mod_base = OTHER; note = 2'-O-methylguanosine-3'-phosphate
  modified_base 2: mod_base = OTHER; note = 2'-O-methylcytidine-3'-phosphate
  modified_base 3: mod_base = OTHER; note = 2'-O-methylcytidine-3'-phosphate
  modified_base 4: mod_base = OTHER; note = 2'-O-methyladenosine-3'-phosphate
  modified_base 5: mod_base = OTHER; note = 2'-O-methyladenosine-3'-phosphate
  modified_base 6: mod_base = OTHER; note = 2'-O-methylguanosine-3'-phosphate
  modified_base 7: mod_base = OTHER; note = 2'-deoxy-2'-fluoroadenosine-3'-phosphate
  modified_base 8: mod_base = OTHER; note = 2'-O-methylguanosine-3'-phosphate
  modified_base 9: mod_base = OTHER; note = 2'-deoxy-2'-fluorocytidine-3'-phosphate
  modified_base 10: mod_base = OTHER; note = 2'-deoxy-2'-fluoroadenosine-3'-phosphate
  modified_base 11: mod_base = OTHER; note = 2'-deoxy-2'-fluorouridine-3'-phosphate
  modified_base 12: mod_base = OTHER; note = 2'-O-methylguanosine-3'-phosphate
  modified_base 13: mod_base = OTHER; note = 2'-O-methyluridine-3'-phosphate
  modified_base 14: mod_base = OTHER; note = 2'-O-methyladenosine-3'-phosphate
  modified_base 15: mod_base = OTHER; note = 2'-O-methyladenosine-3'-phosphate
  modified_base 16: mod_base = OTHER; note = 2'-O-methyladenosine-3'-phosphate
  modified_base 17: mod_base = OTHER; note = 2'-O-methyluridine-3'-phosphate
  modified_base 18: mod_base = OTHER; note = 2'-O-methylguanosine-3'-phosphate
  modified_base 19: mod_base = OTHER; note = 2'-O-methyladenosine-3'-phosphate
  modified_base 20: mod_base = OTHER; note = 2'-O-methyladenosine-3'-phosphate
  modified_base 21: mod_base = OTHER; note = 2'-O-methyladenosine
gccaagagcatgtaaatgaaa

SEQ ID NO: 4414 - RNA, 21 nt, synthetic construct
  source 1..21: mol_type = other RNA
  modified_base 1: mod_base = OTHER; note = 2'-O-methylcytidine-3'-phosphate
  modified_base 2: mod_base = OTHER; note = 2'-O-methylcytidine-3'-phosphate
  modified_base 3: mod_base = OTHER; note = 2'-O-methyladenosine-3'-phosphate
  modified_base 4: mod_base = OTHER; note = 2'-O-methyladenosine-3'-phosphate
  modified_base 5: mod_base = OTHER; note = 2'-O-methylguanosine-3'-phosphate
  modified_base 6: mod_base = OTHER; note = 2'-O-methyladenosine-3'-phosphate
  modified_base 7: mod_base = OTHER; note = 2'-deoxy-2'-fluoroguanosine-3'-phosphate
  modified_base 8: mod_base = OTHER; note = 2'-O-methylcytidine-3'-phosphate
  modified_base 9: mod_base = OTHER; note = 2'-deoxy-2'-fluoroadenosine-3'-phosphate
  modified_base 10: mod_base = OTHER; note = 2'-deoxy-2'-fluorouridine-3'-phosphate
  modified_base 11: mod_base = OTHER; note = 2'-deoxy-2'-fluoroguanosine-3'-phosphate
  modified_base 12: mod_base = OTHER; note = 2'-O-methyluridine-3'-phosphate
  modified_base 13: mod_base = OTHER; note = 2'-O-methyladenosine-3'-phosphate
  modified_base 14: mod_base = OTHER; note = 2'-O-methyladenosine-3'-phosphate
  modified_base 15: mod_base = OTHER; note = 2'-O-methyladenosine-3'-phosphate
  modified_base 16: mod_base = OTHER; note = 2'-O-methyluridine-3'-phosphate
  modified_base 17: mod_base = OTHER; note = 2'-O-methylguanosine-3'-phosphate
  modified_base 18: mod_base = OTHER; note = 2'-O-methyladenosine-3'-phosphate
  modified_base 19: mod_base = OTHER; note = 2'-O-methyladenosine-3'-phosphate
  modified_base 20: mod_base = OTHER; note = 2'-O-methylcytidine-3'-phosphate
  modified_base 21: mod_base = OTHER; note = 2'-O-methyladenosine
ccaagagcatgtaaatgaaca

SEQ ID NO: 4415 - RNA, 21 nt, synthetic construct
  source 1..21: mol_type = other RNA
  modified_base 1: mod_base = OTHER; note = 2'-O-methylcytidine-3'-phosphate
  modified_base 2: mod_base = OTHER; note = 2'-O-methyladenosine-3'-phosphate
  modified_base 3: mod_base = OTHER; note = 2'-O-methyladenosine-3'-phosphate
  modified_base 4: mod_base = OTHER; note = 2'-O-methylguanosine-3'-phosphate
  modified_base 5: mod_base = OTHER; note = 2'-O-methyladenosine-3'-phosphate
  modified_base 6: mod_base = OTHER; note = 2'-O-methylguanosine-3'-phosphate
  modified_base 7: mod_base = OTHER; note = 2'-deoxy-2'-fluorocytidine-3'-phosphate
  modified_base 8: mod_base = OTHER; note = 2'-O-methyladenosine-3'-phosphate
  modified_base 9: mod_base = OTHER; note = 2'-deoxy-2'-fluorouridine-3'-phosphate
  modified_base 10: mod_base = OTHER; note = 2'-deoxy-2'-fluoroguanosine-3'-phosphate
  modified_base 11: mod_base = OTHER; note = 2'-deoxy-2'-fluorouridine-3'-phosphate
  modified_base 12: mod_base = OTHER; note = 2'-O-methyladenosine-3'-phosphate
  modified_base 13: mod_base = OTHER; note = 2'-O-methyladenosine-3'-phosphate
  modified_base 14: mod_base = OTHER; note = 2'-O-methyladenosine-3'-phosphate
  modified_base 15: mod_base = OTHER; note = 2'-O-methyluridine-3'-phosphate
  modified_base 16: mod_base = OTHER; note = 2'-O-methylguanosine-3'-phosphate
  modified_base 17: mod_base = OTHER; note = 2'-O-methyladenosine-3'-phosphate
  modified_base 18: mod_base = OTHER; note = 2'-O-methyladenosine-3'-phosphate
  modified_base 19: mod_base = OTHER; note = 2'-O-methylcytidine-3'-phosphate
  modified_base 20: mod_base = OTHER; note = 2'-O-methyladenosine-3'-phosphate
  modified_base 21: mod_base = OTHER; note = 2'-O-methyladenosine
caagagcatgtaaatgaacaa

SEQ ID NO: 4416 - RNA, 21 nt, synthetic construct
  source 1..21: mol_type = other RNA
  modified_base 1: mod_base = OTHER; note = 2'-O-methyladenosine-3'-phosphate
  modified_base 2: mod_base = OTHER; note = 2'-O-methyladenosine-3'-phosphate
  modified_base 3: mod_base = OTHER; note = 2'-O-methylguanosine-3'-phosphate
  modified_base 4: mod_base = OTHER; note = 2'-O-methyladenosine-3'-phosphate
  modified_base 5: mod_base = OTHER; note = 2'-O-methylguanosine-3'-phosphate
  modified_base 6: mod_base = OTHER; note = 2'-O-methylcytidine-3'-phosphate
  modified_base 7: mod_base = OTHER; note = 2'-deoxy-2'-fluoroadenosine-3'-phosphate
  modified_base 8: mod_base = OTHER; note = 2'-O-methyluridine-3'-phosphate
  modified_base 9: mod_base = OTHER; note = 2'-deoxy-2'-fluoroguanosine-3'-phosphate
  modified_base 10: mod_base = OTHER; note = 2'-deoxy-2'-fluorouridine-3'-phosphate
  modified_base 11: mod_base = OTHER; note = 2'-deoxy-2'-fluoroadenosine-3'-phosphate
  modified_base 12: mod_base = OTHER; note = 2'-O-methyladenosine-3'-phosphate
  modified_base 13: mod_base = OTHER; note = 2'-O-methyladenosine-3'-phosphate
  modified_base 14: mod_base = OTHER; note = 2'-O-methyluridine-3'-phosphate
  modified_base 15: mod_base = OTHER; note = 2'-O-methylguanosine-3'-phosphate
  modified_base 16: mod_base = OTHER; note = 2'-O-methyladenosine-3'-phosphate
  modified_base 17: mod_base = OTHER; note = 2'-O-methyladenosine-3'-phosphate
  modified_base 18: mod_base = OTHER; note = 2'-O-methylcytidine-3'-phosphate
  modified_base 19: mod_base = OTHER; note = 2'-O-methyladenosine-3'-phosphate
  modified_base 20: mod_base = OTHER; note = 2'-O-methyladenosine-3'-phosphate
  modified_base 21: mod_base = OTHER; note = 2'-O-methyladenosine
aagagcatgtaaatgaacaaa

SEQ ID NO: 4417 - RNA, 21 nt, synthetic construct
  source 1..21: mol_type = other RNA
  modified_base 1: mod_base = OTHER; note = 2'-O-methyladenosine-3'-phosphate
  modified_base 2: mod_base = OTHER; note = 2'-O-methylguanosine-3'-phosphate
  modified_base 3: mod_base = OTHER; note = 2'-O-methyladenosine-3'-phosphate
  modified_base 4: mod_base = OTHER; note = 2'-O-methylguanosine-3'-phosphate
  modified_base 5: mod_base = OTHER; note = 2'-O-methylcytidine-3'-phosphate
  modified_base 6: mod_base = OTHER; note = 2'-O-methyladenosine-3'-phosphate
  modified_base 7: mod_base = OTHER; note = 2'-deoxy-2'-fluorouridine-3'-phosphate
  modified_base 8: mod_base = OTHER; note = 2'-O-methylguanosine-3'-phosphate
  modified_base 9: mod_base = OTHER; note = 2'-deoxy-2'-fluorouridine-3'-phosphate
  modified_base 10: mod_base = OTHER; note = 2'-deoxy-2'-fluoroadenosine-3'-phosphate
  modified_base 11: mod_base = OTHER; note = 2'-deoxy-2'-fluoroadenosine-3'-phosphate
  modified_base 12: mod_base = OTHER; note = 2'-O-methyladenosine-3'-phosphate
  modified_base 13: mod_base = OTHER; note = 2'-O-methyluridine-3'-phosphate
  modified_base 14: mod_base = OTHER; note = 2'-O-methylguanosine-3'-phosphate
  modified_base 15: mod_base = OTHER; note = 2'-O-methyladenosine-3'-phosphate
  modified_base 16: mod_base = OTHER; note = 2'-O-methyladenosine-3'-phosphate
  modified_base 17: mod_base = OTHER; note = 2'-O-methylcytidine-3'-phosphate
  modified_base 18: mod_base = OTHER; note = 2'-O-methyladenosine-3'-phosphate
  modified_base 19: mod_base = OTHER; note = 2'-O-methyladenosine-3'-phosphate
  modified_base 20: mod_base = OTHER; note = 2'-O-methylcytidine-3'-phosphate
  modified_base 21: mod_base = OTHER; note = 2'-O-methyladenosine
agagcatgtaaatgaacaaca

SEQ ID NO: 4418 - RNA, 21 nt, synthetic construct
  source 1..21: mol_type = other RNA
  modified_base 1: mod_base = OTHER; note = 2'-O-methylguanosine-3'-phosphate
  modified_base 2: mod_base = OTHER; note = 2'-O-methyladenosine-3'-phosphate
  modified_base 3: mod_base = OTHER; note = 2'-O-methylguanosine-3'-phosphate
  modified_base 4: mod_base = OTHER; note = 2'-O-methylcytidine-3'-phosphate
  modified_base 5: mod_base = OTHER; note = 2'-O-methyladenosine-3'-phosphate
  modified_base 6: mod_base = OTHER; note = 2'-O-methyluridine-3'-phosphate
  modified_base 7: mod_base = OTHER; note = 2'-deoxy-2'-fluoroguanosine-3'-phosphate
  modified_base 8: mod_base = OTHER; note = 2'-O-methyluridine-3'-phosphate
  modified_base 9: mod_base = OTHER; note = 2'-deoxy-2'-fluoroadenosine-3'-phosphate
  modified_base 10: mod_base = OTHER; note = 2'-deoxy-2'-fluoroadenosine-3'-phosphate
  modified_base 11: mod_base = OTHER; note = 2'-deoxy-2'-fluoroadenosine-3'-phosphate
  modified_base 12: mod_base = OTHER; note = 2'-O-methyluridine-3'-phosphate
  modified_base 13: mod_base = OTHER; note = 2'-O-methylguanosine-3'-phosphate
  modified_base 14: mod_base = OTHER; note = 2'-O-methyladenosine-3'-phosphate
  modified_base 15: mod_base = OTHER; note = 2'-O-methyladenosine-3'-phosphate
  modified_base 16: mod_base = OTHER; note = 2'-O-methylcytidine-3'-phosphate
  modified_base 17: mod_base = OTHER; note = 2'-O-methyladenosine-3'-phosphate
  modified_base 18: mod_base = OTHER; note = 2'-O-methyladenosine-3'-phosphate
  modified_base 19: mod_base = OTHER; note = 2'-O-methylcytidine-3'-phosphate
  modified_base 20: mod_base = OTHER; note = 2'-O-methyladenosine-3'-phosphate
  modified_base 21: mod_base = OTHER; note = 2'-O-methyladenosine
gagcatgtaaatgaacaacaa

SEQ ID NO: 4419 - RNA, 21 nt, synthetic construct
  source 1..21: mol_type = other RNA
  modified_base 1: mod_base = OTHER; note = 2'-O-methyladenosine-3'-phosphate
  modified_base 2: mod_base = OTHER; note = 2'-O-methylguanosine-3'-phosphate
  modified_base 3: mod_base = OTHER; note = 2'-O-methylcytidine-3'-phosphate
  modified_base 4: mod_base = OTHER; note = 2'-O-methyladenosine-3'-phosphate
  modified_base 5: mod_base = OTHER; note = 2'-O-methyluridine-3'-phosphate
  modified_base 6: mod_base = OTHER; note = 2'-O-methylguanosine-3'-phosphate
  modified_base 7: mod_base = OTHER; note = 2'-deoxy-2'-fluorouridine-3'-phosphate
  modified_base 8: mod_base = OTHER; note = 2'-O-methyladenosine-3'-phosphate
  modified_base 9: mod_base = OTHER; note = 2'-deoxy-2'-fluoroadenosine-3'-phosphate
  modified_base 10: mod_base = OTHER; note = 2'-deoxy-2'-fluoroadenosine-3'-phosphate
  modified_base 11: mod_base = OTHER; note = 2'-deoxy-2'-fluorouridine-3'-phosphate
  modified_base 12: mod_base = OTHER; note = 2'-O-methylguanosine-3'-phosphate
  modified_base 13: mod_base = OTHER; note = 2'-O-methyladenosine-3'-phosphate
  modified_base 14: mod_base = OTHER; note = 2'-O-methyladenosine-3'-phosphate
  modified_base 15: mod_base = OTHER; note = 2'-O-methylcytidine-3'-phosphate
  modified_base 16: mod_base = OTHER; note = 2'-O-methyladenosine-3'-phosphate
  modified_base 17: mod_base = OTHER; note = 2'-O-methyladenosine-3'-phosphate
  modified_base 18: mod_base = OTHER; note = 2'-O-methylcytidine-3'-phosphate
  modified_base 19: mod_base = OTHER; note = 2'-O-methyladenosine-3'-phosphate
  modified_base 20: mod_base = OTHER; note = 2'-O-methyladenosine-3'-phosphate
  modified_base 21: mod_base = OTHER; note = 2'-O-methyladenosine
agcatgtaaatgaacaacaaa

SEQ ID NO: 4420 - RNA, 21 nt, synthetic construct
  source 1..21: mol_type = other RNA
  modified_base 1: mod_base = OTHER; note = 2'-O-methylguanosine-3'-phosphate
  modified_base 2: mod_base = OTHER; note = 2'-O-methylcytidine-3'-phosphate
  modified_base 3: mod_base = OTHER; note = 2'-O-methyladenosine-3'-phosphate
  modified_base 4: mod_base = OTHER; note = 2'-O-methyluridine-3'-phosphate
  modified_base 5: mod_base = OTHER; note = 2'-O-methylguanosine-3'-phosphate
  modified_base 6: mod_base = OTHER; note = 2'-O-methyluridine-3'-phosphate
  modified_base 7: mod_base = OTHER; note = 2'-deoxy-2'-fluoroadenosine-3'-phosphate
  modified_base 8: mod_base = OTHER; note = 2'-O-methyladenosine-3'-phosphate
  modified_base 9: mod_base = OTHER; note = 2'-deoxy-2'-fluoroadenosine-3'-phosphate
  modified_base 10: mod_base = OTHER; note = 2'-deoxy-2'-fluorouridine-3'-phosphate
  modified_base 11: mod_base = OTHER; note = 2'-deoxy-2'-fluoroguanosine-3'-phosphate
  modified_base 12: mod_base = OTHER; note = 2'-O-methyladenosine-3'-phosphate
  modified_base 13: mod_base = OTHER; note = 2'-O-methyladenosine-3'-phosphate
  modified_base 14: mod_base = OTHER; note = 2'-O-methylcytidine-3'-phosphate
  modified_base 15: mod_base = OTHER; note = 2'-O-methyladenosine-3'-phosphate
  modified_base 16: mod_base = OTHER; note = 2'-O-methyladenosine-3'-phosphate
  modified_base 17: mod_base = OTHER; note = 2'-O-methylcytidine-3'-phosphate
  modified_base 18: mod_base = OTHER; note = 2'-O-methyladenosine-3'-phosphate
  modified_base 19: mod_base = OTHER; note = 2'-O-methyladenosine-3'-phosphate
  modified_base 20: mod_base = OTHER; note = 2'-O-methylguanosine-3'-phosphate
  modified_base 21: mod_base = OTHER; note = 2'-O-methyladenosine
gcatgtaaatgaacaacaaga

SEQ ID NO: 4421 - RNA, 21 nt, synthetic construct
  source 1..21: mol_type = other RNA
  modified_base 1: mod_base = OTHER; note = 2'-O-methylcytidine-3'-phosphate
  modified_base 2: mod_base = OTHER; note = 2'-O-methyladenosine-3'-phosphate
  modified_base 3: mod_base = OTHER; note = 2'-O-methyluridine-3'-phosphate
  modified_base 4: mod_base = OTHER; note = 2'-O-methylguanosine-3'-phosphate
  modified_base 5: mod_base = OTHER; note = 2'-O-methyluridine-3'-phosphate
  modified_base 6: mod_base = OTHER; note = 2'-O-methyladenosine-3'-phosphate
  modified_base 7: mod_base = OTHER; note = 2'-deoxy-2'-fluoroadenosine-3'-phosphate
  modified_base 8: mod_base = OTHER; note = 2'-O-methyladenosine-3'-phosphate
  modified_base 9: mod_base = OTHER; note = 2'-deoxy-2'-fluorouridine-3'-phosphate
  modified_base 10: mod_base = OTHER; note = 2'-deoxy-2'-fluoroguanosine-3'-phosphate
  modified_base 11: mod_base = OTHER; note = 2'-deoxy-2'-fluoroadenosine-3'-phosphate
  modified_base 12: mod_base = OTHER; note = 2'-O-methyladenosine-3'-phosphate
  modified_base 13: mod_base = OTHER; note = 2'-O-methylcytidine-3'-phosphate
  modified_base 14: mod_base = OTHER; note = 2'-O-methyladenosine-3'-phosphate
  modified_base 15: mod_base = OTHER; note = 2'-O-methyladenosine-3'-phosphate
  modified_base 16: mod_base = OTHER; note = 2'-O-methylcytidine-3'-phosphate
  modified_base 17: mod_base = OTHER; note = 2'-O-methyladenosine-3'-phosphate
  modified_base 18: mod_base = OTHER; note = 2'-O-methyladenosine-3'-phosphate
  modified_base 19: mod_base = OTHER; note = 2'-O-methylguanosine-3'-phosphate
  modified_base 20: mod_base = OTHER; note = 2'-O-methylcytidine-3'-phosphate
  modified_base 21: mod_base = OTHER; note = 2'-O-methyladenosine
catgtaaatgaacaacaagca

SEQ ID NO: 4422 - RNA, 21 nt, synthetic construct
  source 1..21: mol_type = other RNA
  modified_base 1: mod_base = OTHER; note = 2'-O-methyladenosine-3'-phosphate
  modified_base 2: mod_base = OTHER; note = 2'-O-methyluridine-3'-phosphate
  modified_base 3: mod_base = OTHER; note = 2'-O-methylguanosine-3'-phosphate
  modified_base 4: mod_base = OTHER; note = 2'-O-methyluridine-3'-phosphate
  modified_base 5: mod_base = OTHER; note = 2'-O-methyladenosine-3'-phosphate
  modified_base 6: mod_base = OTHER; note = 2'-O-methyladenosine-3'-phosphate
  modified_base 7: mod_base = OTHER; note = 2'-deoxy-2'-fluoroadenosine-3'-phosphate
  modified_base 8: mod_base = OTHER; note = 2'-O-methyluridine-3'-phosphate
  modified_base 9: mod_base = OTHER; note = 2'-deoxy-2'-fluoroguanosine-3'-phosphate
  modified_base 10: mod_base = OTHER; note = 2'-deoxy-2'-fluoroadenosine-3'-phosphate
  modified_base 11: mod_base = OTHER; note = 2'-deoxy-2'-fluoroadenosine-3'-phosphate
  modified_base 12: mod_base = OTHER; note = 2'-O-methylcytidine-3'-phosphate
  modified_base 13: mod_base = OTHER; note = 2'-O-methyladenosine-3'-phosphate
  modified_base 14: mod_base = OTHER; note = 2'-O-methyladenosine-3'-phosphate
  modified_base 15: mod_base = OTHER; note = 2'-O-methylcytidine-3'-phosphate
  modified_base 16: mod_base = OTHER; note = 2'-O-methyladenosine-3'-phosphate
  modified_base 17: mod_base = OTHER; note = 2'-O-methyladenosine-3'-phosphate
  modified_base 18: mod_base = OTHER; note = 2'-O-methylguanosine-3'-phosphate
  modified_base 19: mod_base = OTHER; note = 2'-O-methylcytidine-3'-phosphate
  modified_base 20: mod_base = OTHER; note = 2'-O-methyladenosine-3'-phosphate
  modified_base 21: mod_base = OTHER; note = 2'-O-methyladenosine
atgtaaatgaacaacaagcaa

SEQ ID NO: 4423 - RNA, 21 nt, synthetic construct
  source 1..21: mol_type = other RNA
  modified_base 1: mod_base = OTHER; note = 2'-O-methyluridine-3'-phosphate
  modified_base 2: mod_base = OTHER; note = 2'-O-methylguanosine-3'-phosphate
  modified_base 3: mod_base = OTHER; note = 2'-O-methyluridine-3'-phosphate
  modified_base 4: mod_base = OTHER; note = 2'-O-methyladenosine-3'-phosphate
  modified_base 5: mod_base = OTHER; note = 2'-O-methyladenosine-3'-phosphate
  modified_base 6: mod_base = OTHER; note = 2'-O-methyladenosine-3'-phosphate
  modified_base 7: mod_base = OTHER; note = 2'-deoxy-2'-fluorouridine-3'-phosphate
  modified_base 8: mod_base = OTHER; note = 2'-O-methylguanosine-3'-phosphate
  modified_base 9: mod_base = OTHER; note = 2'-deoxy-2'-fluoroadenosine-3'-phosphate
  modified_base 10: mod_base = OTHER; note = 2'-deoxy-2'-fluoroadenosine-3'-phosphate
  modified_base 11: mod_base = OTHER; note = 2'-deoxy-2'-fluorocytidine-3'-phosphate
  modified_base 12: mod_base = OTHER; note = 2'-O-methyladenosine-3'-phosphate
  modified_base 13: mod_base = OTHER; note = 2'-O-methyladenosine-3'-phosphate
  modified_base 14: mod_base = OTHER; note = 2'-O-methylcytidine-3'-phosphate
  modified_base 15: mod_base = OTHER; note = 2'-O-methyladenosine-3'-phosphate
  modified_base 16: mod_base = OTHER; note = 2'-O-methyladenosine-3'-phosphate
  modified_base 17: mod_base = OTHER; note = 2'-O-methylguanosine-3'-phosphate
  modified_base 18: mod_base = OTHER; note = 2'-O-methylcytidine-3'-phosphate
  modified_base 19: mod_base = OTHER; note = 2'-O-methyladenosine-3'-phosphate
  modified_base 20: mod_base = OTHER; note = 2'-O-methyladenosine-3'-phosphate
  modified_base 21: mod_base = OTHER; note = 2'-O-methyladenosine
tgtaaatgaacaacaagcaaa

SEQ ID NO: 4424 - RNA, 21 nt, synthetic construct
  source 1..21: mol_type = other RNA
  modified_base 1: mod_base = OTHER; note = 2'-O-methylguanosine-3'-phosphate
  modified_base 2: mod_base = OTHER; note = 2'-O-methyluridine-3'-phosphate
  modified_base 3: mod_base = OTHER; note = 2'-O-methyladenosine-3'-phosphate
  modified_base 4: mod_base = OTHER; note = 2'-O-methyladenosine-3'-phosphate
  modified_base 5: mod_base = OTHER; note = 2'-O-methyladenosine-3'-phosphate
  modified_base 6: mod_base = OTHER; note = 2'-O-methyluridine-3'-phosphate
  modified_base 7: mod_base = OTHER; note = 2'-deoxy-2'-fluoroguanosine-3'-phosphate
  modified_base 8: mod_base = OTHER; note = 2'-O-methyladenosine-3'-phosphate
  modified_base 9: mod_base = OTHER; note = 2'-deoxy-2'-fluoroadenosine-3'-phosphate
  modified_base 10: mod_base = OTHER; note = 2'-deoxy-2'-fluorocytidine-3'-phosphate
  modified_base 11: mod_base = OTHER; note = 2'-deoxy-2'-fluoroadenosine-3'-phosphate
  modified_base 12: mod_base = OTHER; note = 2'-O-methyladenosine-3'-phosphate
  modified_base 13: mod_base = OTHER; note = 2'-O-methylcytidine-3'-phosphate
  modified_base 14: mod_base = OTHER; note = 2'-O-methyladenosine-3'-phosphate
  modified_base 15: mod_base = OTHER; note = 2'-O-methyladenosine-3'-phosphate
  modified_base 16: mod_base = OTHER; note = 2'-O-methylguanosine-3'-phosphate
  modified_base 17: mod_base = OTHER; note = 2'-O-methylcytidine-3'-phosphate
  modified_base 18: mod_base = OTHER; note = 2'-O-methyladenosine-3'-phosphate
  modified_base 19: mod_base = OTHER; note = 2'-O-methyladenosine-3'-phosphate
  modified_base 20: mod_base = OTHER; note = 2'-O-methyladenosine-3'-phosphate
  modified_base 21: mod_base = OTHER; note = 2'-O-methyladenosine
gtaaatgaacaacaagcaaaa

SEQ ID NO: 4425 - RNA, 21 nt, synthetic construct
  source 1..21: mol_type = other RNA
  modified_base 1: mod_base = OTHER; note = 2'-O-methyluridine-3'-phosphate
  modified_base 2: mod_base = OTHER; note = 2'-O-methyladenosine-3'-phosphate
  modified_base 3: mod_base = OTHER; note = 2'-O-methyladenosine-3'-phosphate
  modified_base 4: mod_base = OTHER; note = 2'-O-methyladenosine-3'-phosphate
  modified_base 5: mod_base = OTHER; note = 2'-O-methyluridine-3'-phosphate
  modified_base 6: mod_base = OTHER; note = 2'-O-methylguanosine-3'-phosphate
  modified_base 7: mod_base = OTHER; note = 2'-deoxy-2'-fluoroadenosine-3'-phosphate
  modified_base 8: mod_base = OTHER; note = 2'-O-methyladenosine-3'-phosphate
  modified_base 9: mod_base = OTHER; note = 2'-deoxy-2'-fluorocytidine-3'-phosphate
  modified_base 10: mod_base = OTHER; note = 2'-deoxy-2'-fluoroadenosine-3'-phosphate
  modified_base 11: mod_base = OTHER; note = 2'-deoxy-2'-fluoroadenosine-3'-phosphate
  modified_base 12: mod_base = OTHER; note = 2'-O-methylcytidine-3'-phosphate
  modified_base 13: mod_base = OTHER; note = 2'-O-methyladenosine-3'-phosphate
  modified_base 14: mod_base = OTHER; note = 2'-O-methyladenosine-3'-phosphate
  modified_base 15: mod_base = OTHER; note = 2'-O-methylguanosine-3'-phosphate
  modified_base 16: mod_base = OTHER; note = 2'-O-methylcytidine-3'-phosphate
  modified_base 17: mod_base = OTHER; note = 2'-O-methyladenosine-3'-phosphate
  modified_base 18: mod_base = OTHER; note = 2'-O-methyladenosine-3'-phosphate
  modified_base 19: mod_base = OTHER; note = 2'-O-methyladenosine-3'-phosphate
  modified_base 20: mod_base = OTHER; note = 2'-O-methyluridine-3'-phosphate
  modified_base 21: mod_base = OTHER; note = 2'-O-methyladenosine
taaatgaacaacaagcaaata

SEQ ID NO: 4426 - RNA, 21 nt, synthetic construct
  source 1..21: mol_type = other RNA
  modified_base 1: mod_base = OTHER; note = 2'-O-methyladenosine-3'-phosphate
  modified_base 2: mod_base = OTHER; note = 2'-O-methyladenosine-3'-phosphate
  modified_base 3: mod_base = OTHER; note = 2'-O-methyladenosine-3'-phosphate
  modified_base 4: mod_base = OTHER; note = 2'-O-methyluridine-3'-phosphate
  modified_base 5: mod_base = OTHER; note = 2'-O-methylguanosine-3'-phosphate
  modified_base 6: mod_base = OTHER; note = 2'-O-methyladenosine-3'-phosphate
  modified_base 7: mod_base = OTHER; note = 2'-deoxy-2'-fluoroadenosine-3'-phosphate
  modified_base 8: mod_base = OTHER; note = 2'-O-methylcytidine-3'-phosphate
  modified_base 9: mod_base = OTHER; note = 2'-deoxy-2'-fluoroadenosine-3'-phosphate
  modified_base 10: mod_base = OTHER; note = 2'-deoxy-2'-fluoroadenosine-3'-phosphate
  modified_base 11: mod_base = OTHER; note = 2'-deoxy-2'-fluorocytidine-3'-phosphate
  modified_base 12: mod_base = OTHER; note = 2'-O-methyladenosine-3'-phosphate
  modified_base 13: mod_base = OTHER; note = 2'-O-methyladenosine-3'-phosphate
  modified_base 14: mod_base = OTHER; note = 2'-O-methylguanosine-3'-phosphate
  modified_base 15: mod_base = OTHER; note = 2'-O-methylcytidine-3'-phosphate
  modified_base 16: mod_base = OTHER; note = 2'-O-methyladenosine-3'-phosphate
  modified_base 17: mod_base = OTHER; note = 2'-O-methyladenosine-3'-phosphate
  modified_base 18: mod_base = OTHER; note = 2'-O-methyladenosine-3'-phosphate
  modified_base 19: mod_base = OTHER; note = 2'-O-methyluridine-3'-phosphate
  modified_base 20: mod_base = OTHER; note = 2'-O-methyladenosine-3'-phosphate
  modified_base 21: mod_base = OTHER; note = 2'-O-methyladenosine
aaatgaacaacaagcaaataa

SEQ ID NO: 4427 - RNA, 21 nt, synthetic construct
  source 1..21: mol_type = other RNA
  modified_base 1: mod_base = OTHER; note = 2'-O-methyladenosine-3'-phosphate
  modified_base 2: mod_base = OTHER; note = 2'-O-methyladenosine-3'-phosphate
  modified_base 3: mod_base = OTHER; note = 2'-O-methyluridine-3'-phosphate
  modified_base 4: mod_base = OTHER; note = 2'-O-methylguanosine-3'-phosphate
  modified_base 5: mod_base = OTHER; note = 2'-O-methyladenosine-3'-phosphate
  modified_base 6: mod_base = OTHER; note = 2'-O-methyladenosine-3'-phosphate
  modified_base 7: mod_base = OTHER; note = 2'-deoxy-2'-fluorocytidine-3'-phosphate
  modified_base 8: mod_base = OTHER; note = 2'-O-methyladenosine-3'-phosphate
  modified_base 9: mod_base = OTHER; note = 2'-deoxy-2'-fluoroadenosine-3'-phosphate
  modified_base 10: mod_base = OTHER; note = 2'-deoxy-2'-fluorocytidine-3'-phosphate
  modified_base 11: mod_base = OTHER; note = 2'-deoxy-2'-fluoroadenosine-3'-phosphate
  modified_base 12: mod_base = OTHER; note = 2'-O-methyladenosine-3'-phosphate
  modified_base 13: mod_base = OTHER; note = 2'-O-methylguanosine-3'-phosphate
  modified_base 14: mod_base = OTHER; note = 2'-O-methylcytidine-3'-phosphate
  modified_base 15: mod_base = OTHER; note = 2'-O-methyladenosine-3'-phosphate
  modified_base 16: mod_base = OTHER; note = 2'-O-methyladenosine-3'-phosphate
  modified_base 17: mod_base = OTHER; note = 2'-O-methyladenosine-3'-phosphate
  modified_base 18: mod_base = OTHER; note = 2'-O-methyluridine-3'-phosphate
  modified_base 19: mod_base = OTHER; note = 2'-O-methyladenosine-3'-phosphate
  modified_base 20: mod_base = OTHER; note = 2'-O-methyluridine-3'-phosphate
  modified_base 21: mod_base = OTHER; note = 2'-O-methyladenosine
aatgaacaacaagcaaatata

SEQ ID NO: 4428 - RNA, 21 nt, synthetic construct
  source 1..21: mol_type = other RNA
  modified_base 1: mod_base = OTHER; note = 2'-O-methyladenosine-3'-phosphate
  modified_base 2: mod_base = OTHER; note = 2'-O-methyluridine-3'-phosphate
  modified_base 3: mod_base = OTHER; note = 2'-O-methylguanosine-3'-phosphate
  modified_base 4: mod_base = OTHER; note = 2'-O-methyladenosine-3'-phosphate
  modified_base 5: mod_base = OTHER; note = 2'-O-methyladenosine-3'-phosphate
  modified_base 6: mod_base = OTHER; note = 2'-O-methylcytidine-3'-phosphate
  modified_base 7: mod_base = OTHER; note = 2'-deoxy-2'-fluoroadenosine-3'-phosphate
  modified_base 8: mod_base = OTHER; note = 2'-O-methyladenosine-3'-phosphate
  modified_base 9: mod_base = OTHER; note = 2'-deoxy-2'-fluorocytidine-3'-phosphate
  modified_base 10: mod_base = OTHER; note = 2'-deoxy-2'-fluoroadenosine-3'-phosphate
  modified_base 11: mod_base = OTHER; note = 2'-deoxy-2'-fluoroadenosine-3'-phosphate
  modified_base 12: mod_base = OTHER; note = 2'-O-methylguanosine-3'-phosphate
  modified_base 13: mod_base = OTHER; note = 2'-O-methylcytidine-3'-phosphate
  modified_base 14: mod_base = OTHER; note = 2'-O-methyladenosine-3'-phosphate
  modified_base 15: mod_base = OTHER; note = 2'-O-methyladenosine-3'-phosphate
  modified_base 16: mod_base = OTHER; note = 2'-O-methyladenosine-3'-phosphate
  modified_base 17: mod_base = OTHER; note = 2'-O-methyluridine-3'-phosphate
  modified_base 18: mod_base = OTHER; note = 2'-O-methyladenosine-3'-phosphate
  modified_base 19: mod_base = OTHER; note = 2'-O-methyluridine-3'-phosphate
  modified_base 20: mod_base = OTHER; note = 2'-O-methyluridine-3'-phosphate
  modified_base 21: mod_base = OTHER; note = 2'-O-methyladenosine
atgaacaacaagcaaatatta

SEQ ID NO: 4429 - RNA, 21 nt, synthetic construct
  source 1..21: mol_type = other RNA
  modified_base 1: mod_base = OTHER; note = 2'-O-methyluridine-3'-phosphate
  modified_base 2: mod_base = OTHER; note = 2'-O-methylguanosine-3'-phosphate
  modified_base 3: mod_base = OTHER; note = 2'-O-methyladenosine-3'-phosphate
  modified_base 4: mod_base = OTHER; note = 2'-O-methyladenosine-3'-phosphate
  modified_base 5: mod_base = OTHER; note = 2'-O-methylcytidine-3'-phosphate
  modified_base 6: mod_base = OTHER; note = 2'-O-methyladenosine-3'-phosphate
  modified_base 7: mod_base = OTHER; note = 2'-deoxy-2'-fluoroadenosine-3'-phosphate
  modified_base 8: mod_base = OTHER; note = 2'-O-methylcytidine-3'-phosphate
  modified_base 9: mod_base = OTHER; note = 2'-deoxy-2'-fluoroadenosine-3'-phosphate
  modified_base 10: mod_base = OTHER; note = 2'-deoxy-2'-fluoroadenosine-3'-phosphate
  modified_base 11: mod_base = OTHER; note = 2'-deoxy-2'-fluoroguanosine-3'-phosphate
  modified_base 12: mod_base = OTHER; note = 2'-O-methylcytidine-3'-phosphate
  modified_base 13: mod_base = OTHER; note = 2'-O-methyladenosine-3'-phosphate
  modified_base 14: mod_base = OTHER; note = 2'-O-methyladenosine-3'-phosphate
  modified_base 15: mod_base = OTHER; note = 2'-O-methyladenosine-3'-phosphate
  modified_base 16: mod_base = OTHER; note = 2'-O-methyluridine-3'-phosphate
  modified_base 17: mod_base = OTHER; note = 2'-O-methyladenosine-3'-phosphate
  modified_base 18: mod_base = OTHER; note = 2'-O-methyluridine-3'-phosphate
  modified_base 19: mod_base = OTHER; note = 2'-O-methyluridine-3'-phosphate
  modified_base 20: mod_base = OTHER; note = 2'-O-methylguanosine-3'-phosphate
  modified_base 21: mod_base = OTHER; note = 2'-O-methyladenosine
tgaacaacaagcaaatattga

SEQ ID NO: 4430 - RNA, 21 nt, synthetic construct
  source 1..21: mol_type = other RNA
  modified_base 1: mod_base = OTHER; note = 2'-O-methylguanosine-3'-phosphate
  modified_base 2: mod_base = OTHER; note = 2'-O-methyladenosine-3'-phosphate
  modified_base 3: mod_base = OTHER; note = 2'-O-methyladenosine-3'-phosphate
  modified_base 4: mod_base = OTHER; note = 2'-O-methylcytidine-3'-phosphate
  modified_base 5: mod_base = OTHER; note = 2'-O-methyladenosine-3'-phosphate
  modified_base 6: mod_base = OTHER; note = 2'-O-methyladenosine-3'-phosphate
  modified_base 7: mod_base = OTHER; note = 2'-deoxy-2'-fluorocytidine-3'-phosphate
  modified_base 8: mod_base = OTHER; note = 2'-O-methyladenosine-3'-phosphate
  modified_base 9: mod_base = OTHER; note = 2'-deoxy-2'-fluoroadenosine-3'-phosphate
  modified_base 10: mod_base = OTHER; note = 2'-deoxy-2'-fluoroguanosine-3'-phosphate
  modified_base 11: mod_base = OTHER; note = 2'-deoxy-2'-fluorocytidine-3'-phosphate
  modified_base 12: mod_base = OTHER; note = 2'-O-methyladenosine-3'-phosphate
  modified_base 13: mod_base = OTHER; note = 2'-O-methyladenosine-3'-phosphate
  modified_base 14: mod_base = OTHER; note = 2'-O-methyladenosine-3'-phosphate
  modified_base 15: mod_base = OTHER; note = 2'-O-methyluridine-3'-phosphate
  modified_base 16: mod_base = OTHER; note = 2'-O-methyladenosine-3'-phosphate
  modified_base 17: mod_base = OTHER; note = 2'-O-methyluridine-3'-phosphate
  modified_base 18: mod_base = OTHER; note = 2'-O-methyluridine-3'-phosphate
  modified_base 19: mod_base = OTHER; note = 2'-O-methylguanosine-3'-phosphate
  modified_base 20: mod_base = OTHER; note = 2'-O-methyladenosine-3'-phosphate
  modified_base 21: mod_base = OTHER; note = 2'-O-methyladenosine
gaacaacaagcaaatattgaa

SEQ ID NO: 4431 - RNA, 21 nt, synthetic construct
  source 1..21: mol_type = other RNA
  modified_base 1: mod_base = OTHER; note = 2'-O-methyladenosine-3'-phosphate
  modified_base 2: mod_base = OTHER; note = 2'-O-methyladenosine-3'-phosphate
  modified_base 3: mod_base = OTHER; note = 2'-O-methylcytidine-3'-phosphate
  modified_base 4: mod_base = OTHER; note = 2'-O-methyladenosine-3'-phosphate
  modified_base 5: mod_base = OTHER; note = 2'-O-methyladenosine-3'-phosphate
  modified_base 6: mod_base = OTHER; note = 2'-O-methylcytidine-3'-phosphate
  modified_base 7: mod_base = OTHER; note = 2'-deoxy-2'-fluoroadenosine-3'-phosphate
  modified_base 8: mod_base = OTHER; note = 2'-O-methyladenosine-3'-phosphate
  modified_base 9: mod_base = OTHER; note = 2'-deoxy-2'-fluoroguanosine-3'-phosphate
  modified_base 10: mod_base = OTHER; note = 2'-deoxy-2'-fluorocytidine-3'-phosphate
  modified_base 11: mod_base = OTHER; note = 2'-deoxy-2'-fluoroadenosine-3'-phosphate
  modified_base 12: mod_base = OTHER; note = 2'-O-methyladenosine-3'-phosphate
  modified_base 13: mod_base = OTHER; note = 2'-O-methyladenosine-3'-phosphate
  modified_base 14: mod_base = OTHER; note = 2'-O-methyluridine-3'-phosphate
  modified_base 15: mod_base = OTHER; note = 2'-O-methyladenosine-3'-phosphate
  modified_base 16: mod_base = OTHER; note = 2'-O-methyluridine-3'-phosphate
  modified_base 17: mod_base = OTHER; note = 2'-O-methyluridine-3'-phosphate
  modified_base 18: mod_base = OTHER; note = 2'-O-methylguanosine-3'-phosphate
  modified_base 19: mod_base = OTHER; note = 2'-O-methyladenosine-3'-phosphate
  modified_base 20: mod_base = OTHER; note = 2'-O-methyladenosine-3'-phosphate
  modified_base 21: mod_base = OTHER; note = 2'-O-methyladenosine
aacaacaagcaaatattgaaa

SEQ ID NO: 4432 - RNA, 21 nt, synthetic construct
  source 1..21: mol_type = other RNA
  modified_base 1: mod_base = OTHER; note = 2'-O-methyladenosine-3'-phosphate
  modified_base 2: mod_base = OTHER; note = 2'-O-methylcytidine-3'-phosphate
  modified_base 3: mod_base = OTHER; note = 2'-O-methyladenosine-3'-phosphate
  modified_base 4: mod_base = OTHER; note = 2'-O-methyladenosine-3'-phosphate
  modified_base 5: mod_base = OTHER; note = 2'-O-methylcytidine-3'-phosphate
  modified_base 6: mod_base = OTHER; note = 2'-O-methyladenosine-3'-phosphate
  modified_base 7: mod_base = OTHER; note = 2'-deoxy-2'-fluoroadenosine-3'-phosphate
  modified_base 8: mod_base = OTHER; note = 2'-O-methylguanosine-3'-phosphate
  modified_base 9: mod_base = OTHER; note = 2'-deoxy-2'-fluorocytidine-3'-phosphate
  modified_base 10: mod_base = OTHER; note = 2'-deoxy-2'-fluoroadenosine-3'-phosphate
  modified_base 11: mod_base = OTHER; note = 2'-deoxy-2'-fluoroadenosine-3'-phosphate
  modified_base 12: mod_base = OTHER; note = 2'-O-methyladenosine-3'-phosphate
  modified_base 13: mod_base = OTHER; note = 2'-O-methyluridine-3'-phosphate
  modified_base 14: mod_base = OTHER; note = 2'-O-methyladenosine-3'-phosphate
  modified_base 15: mod_base = OTHER; note = 2'-O-methyluridine-3'-phosphate
  modified_base 16: mod_base = OTHER; note = 2'-O-methyluridine-3'-phosphate
  modified_base 17: mod_base = OTHER; note = 2'-O-methylguanosine-3'-phosphate
  modified_base 18: mod_base = OTHER; note = 2'-O-methyladenosine-3'-phosphate
  modified_base 19: mod_base = OTHER; note = 2'-O-methyladenosine-3'-phosphate
  modified_base 20: mod_base = OTHER; note = 2'-O-methylguanosine-3'-phosphate
  modified_base 21: mod_base = OTHER; note = 2'-O-methyladenosine
acaacaagcaaatattgaaga

SEQ ID NO: 4433 - RNA, 21 nt, synthetic construct
  source 1..21: mol_type = other RNA
  modified_base 1: mod_base = OTHER; note = 2'-O-methylcytidine-3'-phosphate
  modified_base 2: mod_base = OTHER; note = 2'-O-methyladenosine-3'-phosphate
  modified_base 3: mod_base = OTHER; note = 2'-O-methyladenosine-3'-phosphate
  modified_base 4: mod_base = OTHER; note = 2'-O-methylcytidine-3'-phosphate
  modified_base 5: mod_base = OTHER; note = 2'-O-methyladenosine-3'-phosphate
  modified_base 6: mod_base = OTHER; note = 2'-O-methyladenosine-3'-phosphate
  modified_base 7: mod_base = OTHER; note = 2'-deoxy-2'-fluoroguanosine-3'-phosphate
  modified_base 8: mod_base = OTHER; note = 2'-O-methylcytidine-3'-phosphate
  modified_base 9: mod_base = OTHER; note = 2'-deoxy-2'-fluoroadenosine-3'-phosphate
  modified_base 10: mod_base = OTHER; note = 2'-deoxy-2'-fluoroadenosine-3'-phosphate
  modified_base 11: mod_base = OTHER; note = 2'-deoxy-2'-fluoroadenosine-3'-phosphate
  modified_base 12: mod_base = OTHER; note = 2'-O-methyluridine-3'-phosphate
  modified_base 13: mod_base = OTHER; note = 2'-O-methyladenosine-3'-phosphate
  modified_base 14: mod_base = OTHER; note = 2'-O-methyluridine-3'-phosphate
  modified_base 15: mod_base = OTHER; note = 2'-O-methyluridine-3'-phosphate
  modified_base 16: mod_base = OTHER; note = 2'-O-methylguanosine-3'-phosphate
  modified_base 17: mod_base = OTHER; note = 2'-O-methyladenosine-3'-phosphate
  modified_base 18: mod_base = OTHER; note = 2'-O-methyladenosine-3'-phosphate
  modified_base 19: mod_base = OTHER; note = 2'-O-methylguanosine-3'-phosphate
  modified_base 20: mod_base = OTHER; note = 2'-O-methylguanosine-3'-phosphate
  modified_base 21: mod_base = OTHER; note = 2'-O-methyladenosine
caacaagcaaatattgaagga

SEQ ID NO: 4434 - RNA, 21 nt, synthetic construct
  source 1..21: mol_type = other RNA
  modified_base 1: mod_base = OTHER; note = 2'-O-methyladenosine-3'-phosphate
  modified_base 2: mod_base = OTHER; note = 2'-O-methyladenosine-3'-phosphate
  modified_base 3: mod_base = OTHER; note = 2'-O-methylcytidine-3'-phosphate
  modified_base 4: mod_base = OTHER; note = 2'-O-methyladenosine-3'-phosphate
  modified_base 5: mod_base = OTHER; note = 2'-O-methyladenosine-3'-phosphate
  modified_base 6: mod_base = OTHER; note = 2'-O-methylguanosine-3'-phosphate
  modified_base 7: mod_base = OTHER; note = 2'-deoxy-2'-fluorocytidine-3'-phosphate
  modified_base 8: mod_base = OTHER; note = 2'-O-methyladenosine-3'-phosphate
  modified_base 9: mod_base = OTHER; note = 2'-deoxy-2'-fluoroadenosine-3'-phosphate
  modified_base 10: mod_base = OTHER; note = 2'-deoxy-2'-fluoroadenosine-3'-phosphate
  modified_base 11: mod_base = OTHER; note = 2'-deoxy-2'-fluorouridine-3'-phosphate
  modified_base 12: mod_base = OTHER; note = 2'-O-methyladenosine-3'-phosphate
  modified_base 13: mod_base = OTHER; note = 2'-O-methyluridine-3'-phosphate
  modified_base 14: mod_base = OTHER; note = 2'-O-methyluridine-3'-phosphate
  modified_base 15: mod_base = OTHER; note = 2'-O-methylguanosine-3'-phosphate
  modified_base 16: mod_base = OTHER; note = 2'-O-methyladenosine-3'-phosphate
  modified_base 17: mod_base = OTHER; note = 2'-O-methyladenosine-3'-phosphate
  modified_base 18: mod_base = OTHER; note = 2'-O-methylguanosine-3'-phosphate
  modified_base 19: mod_base = OTHER; note = 2'-O-methylguanosine-3'-phosphate
  modified_base 20: mod_base = OTHER; note = 2'-O-methyluridine-3'-phosphate
  modified_base 21: mod_base = OTHER; note = 2'-O-methyladenosine
aacaagcaaatattgaaggta

SEQ ID NO: 4435 - RNA, 21 nt, synthetic construct
  source 1..21: mol_type = other RNA
  modified_base 1: mod_base = OTHER; note = 2'-O-methyladenosine-3'-phosphate
  modified_base 2: mod_base = OTHER; note = 2'-O-methylcytidine-3'-phosphate
  modified_base 3: mod_base = OTHER; note = 2'-O-methyladenosine-3'-phosphate
  modified_base 4: mod_base = OTHER; note = 2'-O-methyladenosine-3'-phosphate
  modified_base 5: mod_base = OTHER; note = 2'-O-methylguanosine-3'-phosphate
  modified_base 6: mod_base = OTHER; note = 2'-O-methylcytidine-3'-phosphate
  modified_base 7: mod_base = OTHER; note = 2'-deoxy-2'-fluoroadenosine-3'-phosphate
  modified_base 8: mod_base = OTHER; note = 2'-O-methyladenosine-3'-phosphate
  modified_base 9: mod_base = OTHER; note = 2'-deoxy-2'-fluoroadenosine-3'-phosphate
  modified_base 10: mod_base = OTHER; note = 2'-deoxy-2'-fluorouridine-3'-phosphate
  modified_base 11: mod_base = OTHER; note = 2'-deoxy-2'-fluoroadenosine-3'-phosphate
  modified_base 12: mod_base = OTHER; note = 2'-O-methyluridine-3'-phosphate
  modified_base 13: mod_base = OTHER; note = 2'-O-methyluridine-3'-phosphate
  modified_base 14: mod_base = OTHER; note = 2'-O-methylguanosine-3'-phosphate
  modified_base 15: mod_base = OTHER; note = 2'-O-methyladenosine-3'-phosphate
  modified_base 16: mod_base = OTHER; note = 2'-O-methyladenosine-3'-phosphate
  modified_base 17: mod_base = OTHER; note = 2'-O-methylguanosine-3'-phosphate
  modified_base 18: mod_base = OTHER; note = 2'-O-methylguanosine-3'-phosphate
  modified_base 19: mod_base = OTHER; note = 2'-O-methyluridine-3'-phosphate
  modified_base 20: mod_base = OTHER; note = 2'-O-methylguanosine-3'-phosphate
  modified_base 21: mod_base = OTHER; note = 2'-O-methyladenosine
acaagcaaatattgaaggtga

SEQ ID NO: 4436 - RNA, 21 nt, synthetic construct
  source 1..21: mol_type = other RNA
  modified_base 1: mod_base = OTHER; note = 2'-O-methylcytidine-3'-phosphate
  modified_base 2: mod_base = OTHER; note = 2'-O-methyladenosine-3'-phosphate
  modified_base 3: mod_base = OTHER; note = 2'-O-methylcytidine-3'-phosphate
  modified_base 4: mod_base = OTHER; note = 2'-O-methyluridine-3'-phosphate
  modified_base 5: mod_base = OTHER; note = 2'-O-methyluridine-3'-phosphate
  modified_base 6: mod_base = OTHER; note = 2'-O-methyladenosine-3'-phosphate
  modified_base 7: mod_base = OTHER; note = 2'-deoxy-2'-fluorouridine-3'-phosphate
  modified_base 8: mod_base = OTHER; note = 2'-O-methyluridine-3'-phosphate
  modified_base 9: mod_base = OTHER; note = 2'-deoxy-2'-fluorouridine-3'-phosphate
  modified_base 10: mod_base = OTHER; note = 2'-deoxy-2'-fluorocytidine-3'-phosphate
  modified_base 11: mod_base = OTHER; note = 2'-deoxy-2'-fluorocytidine-3'-phosphate
  modified_base 12: mod_base = OTHER; note = 2'-O-methylcytidine-3'-phosphate
  modified_base 13: mod_base = OTHER; note = 2'-O-methyladenosine-3'-phosphate
  modified_base 14: mod_base = OTHER; note = 2'-O-methyluridine-3'-phosphate
  modified_base 15: mod_base = OTHER; note = 2'-O-methyluridine-3'-phosphate
  modified_base 16: mod_base = OTHER; note = 2'-O-methylguanosine-3'-phosphate
  modified_base 17: mod_base = OTHER; note = 2'-O-methylcytidine-3'-phosphate
  modified_base 18: mod_base = OTHER; note = 2'-O-methyluridine-3'-phosphate
  modified_base 19: mod_base = OTHER; note = 2'-O-methyladenosine-3'-phosphate
  modified_base 20: mod_base = OTHER; note = 2'-O-methyladenosine-3'-phosphate
  modified_base 21: mod_base = OTHER; note = 2'-O-methyladenosine
cacttatttcccattgctaaa

SEQ ID NO: 4437 - RNA, 21 nt, synthetic construct
  source 1..21: mol_type = other RNA
  modified_base 1: mod_base = OTHER; note = 2'-O-methyladenosine-3'-phosphate
  modified_base 2: mod_base = OTHER; note = 2'-O-methylcytidine-3'-phosphate
  modified_base 3: mod_base = OTHER; note = 2'-O-methyluridine-3'-phosphate
  modified_base 4: mod_base = OTHER; note = 2'-O-methyluridine-3'-phosphate
  modified_base 5: mod_base = OTHER; note = 2'-O-methyladenosine-3'-phosphate
  modified_base 6: mod_base = OTHER; note = 2'-O-methyluridine-3'-phosphate
  modified_base 7: mod_base = OTHER; note = 2'-deoxy-2'-fluorouridine-3'-phosphate
  modified_base 8: mod_base = OTHER; note = 2'-O-methyluridine-3'-phosphate
  modified_base 9: mod_base = OTHER; note = 2'-deoxy-2'-fluorocytidine-3'-phosphate
  modified_base 10: mod_base = OTHER; note = 2'-deoxy-2'-fluorocytidine-3'-phosphate
  modified_base 11: mod_base = OTHER; note = 2'-deoxy-2'-fluorocytidine-3'-phosphate
  modified_base 12: mod_base = OTHER; note = 2'-O-methyladenosine-3'-phosphate
  modified_base 13: mod_base = OTHER; note = 2'-O-methyluridine-3'-phosphate
  modified_base 14: mod_base = OTHER; note = 2'-O-methyluridine-3'-phosphate
  modified_base 15: mod_base = OTHER; note = 2'-O-methylguanosine-3'-phosphate
  modified_base 16: mod_base = OTHER; note = 2'-O-methylcytidine-3'-phosphate
  modified_base 17: mod_base = OTHER; note = 2'-O-methyluridine-3'-phosphate
  modified_base 18: mod_base = OTHER; note = 2'-O-methyladenosine-3'-phosphate
  modified_base 19: mod_base = OTHER; note = 2'-O-methyladenosine-3'-phosphate
  modified_base 20: mod_base = OTHER; note = 2'-O-methyluridine-3'-phosphate
  modified_base 21: mod_base = OTHER; note = 2'-O-methyladenosine
acttatttcccattgctaata

SEQ ID NO: 4438 - RNA, 21 nt, synthetic construct
  source 1..21: mol_type = other RNA
  modified_base 1: mod_base = OTHER; note = 2'-O-methylcytidine-3'-phosphate
  modified_base 2: mod_base = OTHER; note = 2'-O-methyluridine-3'-phosphate
  modified_base 3: mod_base = OTHER; note = 2'-O-methyluridine-3'-phosphate
  modified_base 4: mod_base = OTHER; note = 2'-O-methyladenosine-3'-phosphate
  modified_base 5: mod_base = OTHER; note = 2'-O-methyluridine-3'-phosphate
  modified_base 6: mod_base = OTHER; note = 2'-O-methyluridine-3'-phosphate
  modified_base 7: mod_base = OTHER; note = 2'-deoxy-2'-fluorouridine-3'-phosphate
  modified_base 8: mod_base = OTHER; note = 2'-O-methylcytidine-3'-phosphate
  modified_base 9: mod_base = OTHER; note = 2'-deoxy-2'-fluorocytidine-3'-phosphate
  modified_base 10: mod_base = OTHER; note = 2'-deoxy-2'-fluorocytidine-3'-phosphate
  modified_base 11: mod_base = OTHER; note = 2'-deoxy-2'-fluoroadenosine-3'-phosphate
  modified_base 12: mod_base = OTHER; note = 2'-O-methyluridine-3'-phosphate
  modified_base 13: mod_base = OTHER; note = 2'-O-methyluridine-3'-phosphate
  modified_base 14: mod_base = OTHER; note = 2'-O-methylguanosine-3'-phosphate
  modified_base 15: mod_base = OTHER; note = 2'-O-methylcytidine-3'-phosphate
  modified_base 16: mod_base = OTHER; note = 2'-O-methyluridine-3'-phosphate
  modified_base 17: mod_base = OTHER; note = 2'-O-methyladenosine-3'-phosphate
  modified_base 18: mod_base = OTHER; note = 2'-O-methyladenosine-3'-phosphate
  modified_base 19: mod_base = OTHER; note = 2'-O-methyluridine-3'-phosphate
  modified_base 20: mod_base = OTHER; note = 2'-O-methyluridine-3'-phosphate
  modified_base 21: mod_base = OTHER; note = 2'-O-methyladenosine
cttatttcccattgctaatta

SEQ ID NO: 4439 - RNA, 21 nt, synthetic construct
  source 1..21: mol_type = other RNA
  modified_base 1: mod_base = OTHER; note = 2'-O-methyluridine-3'-phosphate
  modified_base 2: mod_base = OTHER; note = 2'-O-methyluridine-3'-phosphate
  modified_base 3: mod_base = OTHER; note = 2'-O-methyladenosine-3'-phosphate
  modified_base 4: mod_base = OTHER; note = 2'-O-methyluridine-3'-phosphate
  modified_base 5: mod_base = OTHER; note = 2'-O-methyluridine-3'-phosphate
  modified_base 6: mod_base = OTHER; note = 2'-O-methyluridine-3'-phosphate
  modified_base 7: mod_base = OTHER; note = 2'-deoxy-2'-fluorocytidine-3'-phosphate
  modified_base 8: mod_base = OTHER; note = 2'-O-methylcytidine-3'-phosphate
  modified_base 9: mod_base = OTHER; note = 2'-deoxy-2'-fluorocytidine-3'-phosphate
  modified_base 10: mod_base = OTHER; note = 2'-deoxy-2'-fluoroadenosine-3'-phosphate
  modified_base 11: mod_base = OTHER; note = 2'-deoxy-2'-fluorouridine-3'-phosphate
  modified_base 12: mod_base = OTHER; note = 2'-O-methyluridine-3'-phosphate
  modified_base 13: mod_base = OTHER; note = 2'-O-methylguanosine-3'-phosphate
  modified_base 14: mod_base = OTHER; note = 2'-O-methylcytidine-3'-phosphate
  modified_base 15: mod_base = OTHER; note = 2'-O-methyluridine-3'-phosphate
  modified_base 16: mod_base = OTHER; note = 2'-O-methyladenosine-3'-phosphate
  modified_base 17: mod_base = OTHER; note = 2'-O-methyladenosine-3'-phosphate
  modified_base 18: mod_base = OTHER; note = 2'-O-methyluridine-3'-phosphate
  modified_base 19: mod_base = OTHER; note = 2'-O-methyluridine-3'-phosphate
  modified_base 20: mod_base = OTHER; note = 2'-O-methylguanosine-3'-phosphate
  modified_base 21: mod_base = OTHER; note = 2'-O-methyladenosine
ttatttcccattgctaattga

SEQ ID NO: 4440 - RNA, 21 nt, synthetic construct
  source 1..21: mol_type = other RNA
  modified_base 1: mod_base = OTHER; note = 2'-O-methyladenosine-3'-phosphate
  modified_base 2: mod_base = OTHER; note = 2'-O-methyluridine-3'-phosphate
  modified_base 3: mod_base = OTHER; note = 2'-O-methyluridine-3'-phosphate
  modified_base 4: mod_base = OTHER; note = 2'-O-methyluridine-3'-phosphate
  modified_base 5: mod_base = OTHER; note = 2'-O-methylcytidine-3'-phosphate
  modified_base 6: mod_base = OTHER; note = 2'-O-methylcytidine-3'-phosphate
  modified_base 7: mod_base = OTHER; note = 2'-deoxy-2'-fluorocytidine-3'-phosphate
  modified_base 8: mod_base = OTHER; note = 2'-O-methyladenosine-3'-phosphate
  modified_base 9: mod_base = OTHER; note = 2'-deoxy-2'-fluorouridine-3'-phosphate
  modified_base 10: mod_base = OTHER; note = 2'-deoxy-2'-fluorouridine-3'-phosphate
  modified_base 11: mod_base = OTHER; note = 2'-deoxy-2'-fluoroguanosine-3'-phosphate
  modified_base 12: mod_base = OTHER; note = 2'-O-methylcytidine-3'-phosphate
  modified_base 13: mod_base = OTHER; note = 2'-O-methyluridine-3'-phosphate
  modified_base 14: mod_base = OTHER; note = 2'-O-methyladenosine-3'-phosphate
  modified_base 15: mod_base = OTHER; note = 2'-O-methyladenosine-3'-phosphate
  modified_base 16: mod_base = OTHER; note = 2'-O-methyluridine-3'-phosphate
  modified_base 17: mod_base = OTHER; note = 2'-O-methyluridine-3'-phosphate
  modified_base 18: mod_base = OTHER; note = 2'-O-methylguanosine-3'-phosphate
  modified_base 19: mod_base = OTHER; note = 2'-O-methylcytidine-3'-phosphate
  modified_base 20: mod_base = OTHER; note = 2'-O-methylcytidine-3'-phosphate
  modified_base 21: mod_base = OTHER; note = 2'-O-methyladenosine
atttcccattgctaattgcca

SEQ ID NO: 4441 - RNA, 21 nt, synthetic construct
  source 1..21: mol_type = other RNA
  modified_base 1: mod_base = OTHER; note = 2'-O-methylguanosine-3'-phosphate
  modified_base 2: mod_base = OTHER; note = 2'-O-methylcytidine-3'-phosphate
  modified_base 3: mod_base = OTHER; note = 2'-O-methylcytidine-3'-phosphate
  modified_base 4: mod_base = OTHER; note = 2'-O-methyluridine-3'-phosphate
  modified_base 5: mod_base = OTHER; note = 2'-O-methylguanosine-3'-phosphate
  modified_base 6: mod_base = OTHER; note = 2'-O-methylcytidine-3'-phosphate
  modified_base 7: mod_base = OTHER; note = 2'-deoxy-2'-fluorocytidine-3'-phosphate
  modified_base 8: mod_base = OTHER; note = 2'-O-methylcytidine-3'-phosphate
  modified_base 9: mod_base = OTHER; note = 2'-deoxy-2'-fluoroguanosine-3'-phosphate
  modified_base 10: mod_base = OTHER; note = 2'-deoxy-2'-fluoroguanosine-3'-phosphate
  modified_base 11: mod_base = OTHER; note = 2'-deoxy-2'-fluorouridine-3'-phosphate
  modified_base 12: mod_base = OTHER; note = 2'-O-methyluridine-3'-phosphate
  modified_base 13: mod_base = OTHER; note = 2'-O-methyluridine-3'-phosphate
  modified_base 14: mod_base = OTHER; note = 2'-O-methyluridine-3'-phosphate
  modified_base 15: mod_base = OTHER; note = 2'-O-methylguanosine-3'-phosphate
  modified_base 16: mod_base = OTHER; note = 2'-O-methyladenosine-3'-phosphate
  modified_base 17: mod_base = OTHER; note = 2'-O-methyladenosine-3'-phosphate
  modified_base 18: mod_base = OTHER; note = 2'-O-methyladenosine-3'-phosphate
  modified_base 19: mod_base = OTHER; note = 2'-O-methylcytidine-3'-phosphate
  modified_base 20: mod_base = OTHER; note = 2'-O-methyladenosine-3'-phosphate
  modified_base 21: mod_base = OTHER; note = 2'-O-methyladenosine
gcctgcccggttttgaaacaa

SEQ ID NO: 4442 - RNA, 21 nt, synthetic construct
  source 1..21: mol_type = other RNA
  modified_base 1: mod_base = OTHER; note = 2'-O-methyluridine-3'-phosphate
  modified_base 2: mod_base = OTHER; note = 2'-O-methyluridine-3'-phosphate
  modified_base 3: mod_base = OTHER; note = 2'-O-methyluridine-3'-phosphate
  modified_base 4: mod_base = OTHER; note = 2'-O-methyluridine-3'-phosphate
  modified_base 5: mod_base = OTHER; note = 2'-O-methylguanosine-3'-phosphate
  modified_base 6: mod_base = OTHER; note = 2'-O-methyladenosine-3'-phosphate
  modified_base 7: mod_base = OTHER; note = 2'-deoxy-2'-fluoroadenosine-3'-phosphate
  modified_base 8: mod_base = OTHER; note = 2'-O-methyladenosine-3'-phosphate
  modified_base 9: mod_base = OTHER; note = 2'-deoxy-2'-fluorocytidine-3'-phosphate
  modified_base 10: mod_base = OTHER; note = 2'-deoxy-2'-fluoroadenosine-3'-phosphate
  modified_base 11: mod_base = OTHER; note = 2'-deoxy-2'-fluoroguanosine-3'-phosphate
  modified_base 12: mod_base = OTHER; note = 2'-O-methyluridine-3'-phosphate
  modified_base 13: mod_base = OTHER; note = 2'-O-methylcytidine-3'-phosphate
  modified_base 14: mod_base = OTHER; note = 2'-O-methyluridine-3'-phosphate
  modified_base 15: mod_base = OTHER; note = 2'-O-methylguanosine-3'-phosphate
  modified_base 16: mod_base = OTHER; note = 2'-O-methylcytidine-3'-phosphate
  modified_base 17: mod_base = OTHER; note = 2'-O-methyladenosine-3'-phosphate
  modified_base 18: mod_base = OTHER; note = 2'-O-methylguanosine-3'-phosphate
  modified_base 19: mod_base = OTHER; note = 2'-O-methyluridine-3'-phosphate
  modified_base 20: mod_base = OTHER; note = 2'-O-methyladenosine-3'-phosphate
  modified_base 21: mod_base = OTHER; note = 2'-O-methyladenosine
ttttgaaacagtctgcagtaa

SEQ ID NO: 4443 - RNA, 21 nt, synthetic construct
  source 1..21: mol_type = other RNA
  modified_base 1: mod_base = OTHER; note = 2'-O-methyluridine-3'-phosphate
  modified_base 2: mod_base = OTHER; note = 2'-O-methyluridine-3'-phosphate
  modified_base 3: mod_base = OTHER; note = 2'-O-methylguanosine-3'-phosphate
  modified_base 4: mod_base = OTHER; note = 2'-O-methyladenosine-3'-phosphate
  modified_base 5: mod_base = OTHER; note = 2'-O-methyladenosine-3'-phosphate
  modified_base 6: mod_base = OTHER; note = 2'-O-methyladenosine-3'-phosphate
  modified_base 7: mod_base = OTHER; note = 2'-deoxy-2'-fluorocytidine-3'-phosphate
  modified_base 8: mod_base = OTHER; note = 2'-O-methyladenosine-3'-phosphate
  modified_base 9: mod_base = OTHER; note = 2'-deoxy-2'-fluoroguanosine-3'-phosphate
  modified_base 10: mod_base = OTHER; note = 2'-deoxy-2'-fluorouridine-3'-phosphate
  modified_base 11: mod_base = OTHER; note = 2'-deoxy-2'-fluorocytidine-3'-phosphate
  modified_base 12: mod_base = OTHER; note = 2'-O-methyluridine-3'-phosphate
  modified_base 13: mod_base = OTHER; note = 2'-O-methylguanosine-3'-phosphate
  modified_base 14: mod_base = OTHER; note = 2'-O-methylcytidine-3'-phosphate
  modified_base 15: mod_base = OTHER; note = 2'-O-methyladenosine-3'-phosphate
  modified_base 16: mod_base = OTHER; note = 2'-O-methylguanosine-3'-phosphate
  modified_base 17: mod_base = OTHER; note = 2'-O-methyluridine-3'-phosphate
  modified_base 18: mod_base = OTHER; note = 2'-O-methyladenosine-3'-phosphate
  modified_base 19: mod_base = OTHER; note = 2'-O-methylcytidine-3'-phosphate
  modified_base 20: mod_base = OTHER; note = 2'-O-methyladenosine-3'-phosphate
  modified_base 21: mod_base = OTHER; note = 2'-O-methyladenosine
ttgaaacagtctgcagtacaa

SEQ ID NO: 4444 - RNA, 21 nt, synthetic construct
  source 1..21: mol_type = other RNA
  modified_base 1: mod_base = OTHER; note = 2'-O-methylguanosine-3'-phosphate
  modified_base 2: mod_base = OTHER; note = 2'-O-methyluridine-3'-phosphate
  modified_base 3: mod_base = OTHER; note = 2'-O-methylguanosine-3'-phosphate
  modified_base 4: mod_base = OTHER; note = 2'-O-methylguanosine-3'-phosphate
  modified_base 5: mod_base = OTHER; note = 2'-O-methylguanosine-3'-phosphate
  modified_base 6: mod_base = OTHER; note = 2'-O-methyladenosine-3'-phosphate
  modified_base 7: mod_base = OTHER; note = 2'-deoxy-2'-fluoroguanosine-3'-phosphate
  modified_base 8: mod_base = OTHER; note = 2'-O-methyladenosine-3'-phosphate
  modified_base 9: mod_base = OTHER; note = 2'-deoxy-2'-fluoroguanosine-3'-phosphate
  modified_base 10: mod_base = OTHER; note = 2'-deoxy-2'-fluoroadenosine-3'-phosphate
  modified_base 11: mod_base = OTHER; note = 2'-deoxy-2'-fluorouridine-3'-phosphate
  modified_base 12: mod_base = OTHER; note = 2'-O-methyladenosine-3'-phosphate
  modified_base 13: mod_base = OTHER; note = 2'-O-methylcytidine-3'-phosphate
  modified_base 14: mod_base = OTHER; note = 2'-O-methyladenosine-3'-phosphate
  modified_base 15: mod_base = OTHER; note = 2'-O-methyluridine-3'-phosphate
  modified_base 16: mod_base = OTHER; note = 2'-O-methylguanosine-3'-phosphate
  modified_base 17: mod_base = OTHER; note = 2'-O-methyluridine-3'-phosphate
  modified_base 18: mod_base = OTHER; note = 2'-O-methyluridine-3'-phosphate
  modified_base 19: mod_base = OTHER; note = 2'-O-methyluridine-3'-phosphate
  modified_base 20: mod_base = OTHER; note = 2'-O-methyladenosine-3'-phosphate
  modified_base 21: mod_base = OTHER; note = 2'-O-methyladenosine
gtgggagagatacatgtttaa

SEQ ID NO: 4445 - RNA, 21 nt, synthetic construct
  source 1..21: mol_type = other RNA
  modified_base 1: mod_base = OTHER; note = 2'-O-methylguanosine-3'-phosphate
  modified_base 2: mod_base = OTHER; note = 2'-O-methylguanosine-3'-phosphate
  modified_base 3: mod_base = OTHER; note = 2'-O-methylguanosine-3'-phosphate
  modified_base 4: mod_base = OTHER; note = 2'-O-methyladenosine-3'-phosphate
  modified_base 5: mod_base = OTHER; note = 2'-O-methylguanosine-3'-phosphate
  modified_base 6: mod_base = OTHER; note = 2'-O-methyladenosine-3'-phosphate
  modified_base 7: mod_base = OTHER; note = 2'-deoxy-2'-fluoroguanosine-3'-phosphate
  modified_base 8: mod_base = OTHER; note = 2'-O-methyladenosine-3'-phosphate
  modified_base 9: mod_base = OTHER; note = 2'-deoxy-2'-fluorouridine-3'-phosphate
  modified_base 10: mod_base = OTHER; note = 2'-deoxy-2'-fluoroadenosine-3'-phosphate
  modified_base 11: mod_base = OTHER; note = 2'-deoxy-2'-fluorocytidine-3'-phosphate
  modified_base 12: mod_base = OTHER; note = 2'-O-methyladenosine-3'-phosphate
  modified_base 13: mod_base = OTHER; note = 2'-O-methyluridine-3'-phosphate
  modified_base 14: mod_base = OTHER; note = 2'-O-methylguanosine-3'-phosphate
  modified_base 15: mod_base = OTHER; note = 2'-O-methyluridine-3'-phosphate
  modified_base 16: mod_base = OTHER; note = 2'-O-methyluridine-3'-phosphate
  modified_base 17: mod_base = OTHER; note = 2'-O-methyluridine-3'-phosphate
  modified_base 18: mod_base = OTHER; note = 2'-O-methyladenosine-3'-phosphate
  modified_base 19: mod_base = OTHER; note = 2'-O-methylguanosine-3'-phosphate
  modified_base 20: mod_base = OTHER; note = 2'-O-methyladenosine-3'-phosphate
  modified_base 21: mod_base = OTHER; note = 2'-O-methyladenosine
gggagagatacatgtttagaa

SEQ ID NO: 4446 - RNA, 21 nt, synthetic construct
  source 1..21: mol_type = other RNA
  modified_base 1: mod_base = OTHER; note = 2'-O-methylguanosine-3'-phosphate
  modified_base 2: mod_base = OTHER; note = 2'-O-methylguanosine-3'-phosphate
  modified_base 3: mod_base = OTHER; note = 2'-O-methyladenosine-3'-phosphate
  modified_base 4: mod_base = OTHER; note = 2'-O-methylguanosine-3'-phosphate
  modified_base 5: mod_base = OTHER; note = 2'-O-methyladenosine-3'-phosphate
  modified_base 6: mod_base = OTHER; note = 2'-O-methylguanosine-3'-phosphate
  modified_base 7: mod_base = OTHER; note = 2'-deoxy-2'-fluoroadenosine-3'-phosphate
  modified_base 8: mod_base = OTHER; note = 2'-O-methyluridine-3'-phosphate
  modified_base 9: mod_base = OTHER; note = 2'-deoxy-2'-fluoroadenosine-3'-phosphate
  modified_base 10: mod_base = OTHER; note = 2'-deoxy-2'-fluorocytidine-3'-phosphate
  modified_base 11: mod_base = OTHER; note = 2'-deoxy-2'-fluoroadenosine-3'-phosphate
  modified_base 12: mod_base = OTHER; note = 2'-O-methyluridine-3'-phosphate
  modified_base 13: mod_base = OTHER; note = 2'-O-methylguanosine-3'-phosphate
  modified_base 14: mod_base = OTHER; note = 2'-O-methyluridine-3'-phosphate
  modified_base 15: mod_base = OTHER; note = 2'-O-methyluridine-3'-phosphate
  modified_base 16: mod_base = OTHER; note = 2'-O-methyluridine-3'-phosphate
  modified_base 17: mod_base = OTHER; note = 2'-O-methyladenosine-3'-phosphate
  modified_base 18: mod_base = OTHER; note = 2'-O-methylguanosine-3'-phosphate
  modified_base 19: mod_base = OTHER; note = 2'-O-methyladenosine-3'-phosphate
  modified_base 20: mod_base = OTHER; note = 2'-O-methyladenosine-3'-phosphate
  modified_base 21: mod_base = OTHER; note = 2'-O-methyladenosine
ggagagatacatgtttagaaa

SEQ ID NO: 4447 - RNA, 21 nt, synthetic construct
  source 1..21: mol_type = other RNA
  modified_base 1: mod_base = OTHER; note = 2'-O-methylguanosine-3'-phosphate
  modified_base 2: mod_base = OTHER; note = 2'-O-methyladenosine-3'-phosphate
  modified_base 3: mod_base = OTHER; note = 2'-O-methylguanosine-3'-phosphate
  modified_base 4: mod_base = OTHER; note = 2'-O-methyladenosine-3'-phosphate
  modified_base 5: mod_base = OTHER; note = 2'-O-methylguanosine-3'-phosphate
  modified_base 6: mod_base = OTHER; note = 2'-O-methyladenosine-3'-phosphate
  modified_base 7: mod_base = OTHER; note = 2'-deoxy-2'-fluorouridine-3'-phosphate
  modified_base 8: mod_base = OTHER; note = 2'-O-methyladenosine-3'-phosphate
  modified_base 9: mod_base = OTHER; note = 2'-deoxy-2'-fluorocytidine-3'-phosphate
  modified_base 10: mod_base = OTHER; note = 2'-deoxy-2'-fluoroadenosine-3'-phosphate
  modified_base 11: mod_base = OTHER; note = 2'-deoxy-2'-fluorouridine-3'-phosphate
  modified_base 12: mod_base = OTHER; note = 2'-O-methylguanosine-3'-phosphate
  modified_base 13: mod_base = OTHER; note = 2'-O-methyluridine-3'-phosphate
  modified_base 14: mod_base = OTHER; note = 2'-O-methyluridine-3'-phosphate
  modified_base 15: mod_base = OTHER; note = 2'-O-methyluridine-3'-phosphate
  modified_base 16: mod_base = OTHER; note = 2'-O-methyladenosine-3'-phosphate
  modified_base 17: mod_base = OTHER; note = 2'-O-methylguanosine-3'-phosphate
  modified_base 18: mod_base = OTHER; note = 2'-O-methyladenosine-3'-phosphate
  modified_base 19: mod_base = OTHER; note = 2'-O-methyladenosine-3'-phosphate
  modified_base 20: mod_base = OTHER; note = 2'-O-methylguanosine-3'-phosphate
  modified_base 21: mod_base = OTHER; note = 2'-O-methyladenosine
gagagatacatgtttagaaga

SEQ ID NO: 4448 - RNA, 21 nt, synthetic construct
  source 1..21: mol_type = other RNA
  modified_base 1: mod_base = OTHER; note = 2'-O-methylguanosine-3'-phosphate
  modified_base 2: mod_base = OTHER; note = 2'-O-methyladenosine-3'-phosphate
  modified_base 3: mod_base = OTHER; note = 2'-O-methylguanosine-3'-phosphate
  modified_base 4: mod_base = OTHER; note = 2'-O-methyladenosine-3'-phosphate
  modified_base 5: mod_base = OTHER; note = 2'-O-methyluridine-3'-phosphate
  modified_base 6: mod_base = OTHER; note = 2'-O-methyladenosine-3'-phosphate
  modified_base 7: mod_base = OTHER; note = 2'-deoxy-2'-fluorocytidine-3'-phosphate
  modified_base 8: mod_base = OTHER; note = 2'-O-methyladenosine-3'-phosphate
  modified_base 9: mod_base = OTHER; note = 2'-deoxy-2'-fluorouridine-3'-phosphate
  modified_base 10: mod_base = OTHER; note = 2'-deoxy-2'-fluoroguanosine-3'-phosphate
  modified_base 11: mod_base = OTHER; note = 2'-deoxy-2'-fluorouridine-3'-phosphate
  modified_base 12: mod_base = OTHER; note = 2'-O-methyluridine-3'-phosphate
  modified_base 13: mod_base = OTHER; note = 2'-O-methyluridine-3'-phosphate
  modified_base 14: mod_base = OTHER; note = 2'-O-methyladenosine-3'-phosphate
  modified_base 15: mod_base = OTHER; note = 2'-O-methylguanosine-3'-phosphate
  modified_base 16: mod_base = OTHER; note = 2'-O-methyladenosine-3'-phosphate
  modified_base 17: mod_base = OTHER; note = 2'-O-methyladenosine-3'-phosphate
  modified_base 18: mod_base = OTHER; note = 2'-O-methylguanosine-3'-phosphate
  modified_base 19: mod_base = OTHER; note = 2'-O-methylguanosine-3'-phosphate
  modified_base 20: mod_base = OTHER; note = 2'-O-methyladenosine-3'-phosphate
  modified_base 21: mod_base = OTHER; note = 2'-O-methyladenosine
gagatacatgtttagaaggaa

SEQ ID NO: 4449 - RNA, 21 nt, synthetic construct
  source 1..21: mol_type = other RNA
  modified_base 1: mod_base = OTHER; note = 2'-O-methyladenosine-3'-phosphate
  modified_base 2: mod_base = OTHER; note = 2'-O-methylguanosine-3'-phosphate
  modified_base 3: mod_base = OTHER; note = 2'-O-methyladenosine-3'-phosphate
  modified_base 4: mod_base = OTHER; note = 2'-O-methyluridine-3'-phosphate
  modified_base 5: mod_base = OTHER; note = 2'-O-methyladenosine-3'-phosphate
  modified_base 6: mod_base = OTHER; note = 2'-O-methylcytidine-3'-phosphate
  modified_base 7: mod_base = OTHER; note = 2'-deoxy-2'-fluoroadenosine-3'-phosphate
  modified_base 8: mod_base = OTHER; note = 2'-O-methyluridine-3'-phosphate
  modified_base 9: mod_base = OTHER; note = 2'-deoxy-2'-fluoroguanosine-3'-phosphate
  modified_base 10: mod_base = OTHER; note = 2'-deoxy-2'-fluorouridine-3'-phosphate
  modified_base 11: mod_base = OTHER; note = 2'-deoxy-2'-fluorouridine-3'-phosphate
  modified_base 12: mod_base = OTHER; note = 2'-O-methyluridine-3'-phosphate
  modified_base 13: mod_base = OTHER; note = 2'-O-methyladenosine-3'-phosphate
  modified_base 14: mod_base = OTHER; note = 2'-O-methylguanosine-3'-phosphate
  modified_base 15: mod_base = OTHER; note = 2'-O-methyladenosine-3'-phosphate
  modified_base 16: mod_base = OTHER; note = 2'-O-methyladenosine-3'-phosphate
  modified_base 17: mod_base = OTHER; note = 2'-O-methylguanosine-3'-phosphate
  modified_base 18: mod_base = OTHER; note = 2'-O-methylguanosine-3'-phosphate
  modified_base 19: mod_base = OTHER; note = 2'-O-methyladenosine-3'-phosphate
  modified_base 20: mod_base = OTHER; note = 2'-O-methyladenosine-3'-phosphate
  modified_base 21: mod_base = OTHER; note = 2'-O-methyladenosine
agatacatgtttagaaggaaa

SEQ ID NO: 4450 - RNA, 21 nt, synthetic construct
  source 1..21: mol_type = other RNA
  modified_base 1: mod_base = OTHER; note = 2'-O-methylguanosine-3'-phosphate
  modified_base 2: mod_base = OTHER; note = 2'-O-methyladenosine-3'-phosphate
  modified_base 3: mod_base = OTHER; note = 2'-O-methyluridine-3'-phosphate
  modified_base 4: mod_base = OTHER; note = 2'-O-methyladenosine-3'-phosphate
  modified_base 5: mod_base = OTHER; note = 2'-O-methylcytidine-3'-phosphate
  modified_base 6: mod_base = OTHER; note = 2'-O-methyladenosine-3'-phosphate
  modified_base 7: mod_base = OTHER; note = 2'-deoxy-2'-fluorouridine-3'-phosphate
  modified_base 8: mod_base = OTHER; note = 2'-O-methylguanosine-3'-phosphate
  modified_base 9: mod_base = OTHER; note = 2'-deoxy-2'-fluorouridine-3'-phosphate
  modified_base 10: mod_base = OTHER; note = 2'-deoxy-2'-fluorouridine-3'-phosphate
  modified_base 11: mod_base = OTHER; note = 2'-deoxy-2'-fluorouridine-3'-phosphate
  modified_base 12: mod_base = OTHER; note = 2'-O-methyladenosine-3'-phosphate
  modified_base 13: mod_base = OTHER; note = 2'-O-methylguanosine-3'-phosphate
  modified_base 14: mod_base = OTHER; note = 2'-O-methyladenosine-3'-phosphate
  modified_base 15: mod_base = OTHER; note = 2'-O-methyladenosine-3'-phosphate
  modified_base 16: mod_base = OTHER; note = 2'-O-methylguanosine-3'-phosphate
  modified_base 17: mod_base = OTHER; note = 2'-O-methylguanosine-3'-phosphate
  modified_base 18: mod_base = OTHER; note = 2'-O-methyladenosine-3'-phosphate
  modified_base 19: mod_base = OTHER; note = 2'-O-methyladenosine-3'-phosphate
  modified_base 20: mod_base = OTHER; note = 2'-O-methylguanosine-3'-phosphate
  modified_base 21: mod_base = OTHER; note = 2'-O-methyladenosine
gatacatgtttagaaggaaga

SEQ ID NO: 4451 - RNA, 21 nt, synthetic construct
  source 1..21: mol_type = other RNA
  modified_base 1: mod_base = OTHER; note = 2'-O-methyladenosine-3'-phosphate
  modified_base 2: mod_base = OTHER; note = 2'-O-methyluridine-3'-phosphate
  modified_base 3: mod_base = OTHER; note = 2'-O-methyladenosine-3'-phosphate
  modified_base 4: mod_base = OTHER; note = 2'-O-methylcytidine-3'-phosphate
  modified_base 5: mod_base = OTHER; note = 2'-O-methyladenosine-3'-phosphate
  modified_base 6: mod_base = OTHER; note = 2'-O-methyluridine-3'-phosphate
  modified_base 7: mod_base = OTHER; note = 2'-deoxy-2'-fluoroguanosine-3'-phosphate
  modified_base 8: mod_base = OTHER; note = 2'-O-methyluridine-3'-phosphate
  modified_base 9: mod_base = OTHER; note = 2'-deoxy-2'-fluorouridine-3'-phosphate
  modified_base 10: mod_base = OTHER; note = 2'-deoxy-2'-fluorouridine-3'-phosphate
  modified_base 11: mod_base = OTHER; note = 2'-deoxy-2'-fluoroadenosine-3'-phosphate
  modified_base 12: mod_base = OTHER; note = 2'-O-methylguanosine-3'-phosphate
  modified_base 13: mod_base = OTHER; note = 2'-O-methyladenosine-3'-phosphate
  modified_base 14: mod_base = OTHER; note = 2'-O-methyladenosine-3'-phosphate
  modified_base 15: mod_base = OTHER; note = 2'-O-methylguanosine-3'-phosphate
  modified_base 16: mod_base = OTHER; note = 2'-O-methylguanosine-3'-phosphate
  modified_base 17: mod_base = OTHER; note = 2'-O-methyladenosine-3'-phosphate
  modified_base 18: mod_base = OTHER; note = 2'-O-methyladenosine-3'-phosphate
  modified_base 19: mod_base = OTHER; note = 2'-O-methylguanosine-3'-phosphate
  modified_base 20: mod_base = OTHER; note = 2'-O-methyladenosine-3'-phosphate
  modified_base 21: mod_base = OTHER; note = 2'-O-methyladenosine
atacatgtttagaaggaagaa

SEQ ID NO: 4452 - RNA, 21 nt, synthetic construct
  source 1..21: mol_type = other RNA
  modified_base 1: mod_base = OTHER; note = 2'-O-methylcytidine-3'-phosphate
  modified_base 2: mod_base = OTHER; note = 2'-O-methyladenosine-3'-phosphate
  modified_base 3: mod_base = OTHER; note = 2'-O-methyluridine-3'-phosphate
  modified_base 4: mod_base = OTHER; note = 2'-O-methylguanosine-3'-phosphate
  modified_base 5: mod_base = OTHER; note = 2'-O-methyluridine-3'-phosphate
  modified_base 6: mod_base = OTHER; note = 2'-O-methyluridine-3'-phosphate
  modified_base 7: mod_base = OTHER; note = 2'-deoxy-2'-fluorouridine-3'-phosphate
  modified_base 8: mod_base = OTHER; note = 2'-O-methyladenosine-3'-phosphate
  modified_base 9: mod_base = OTHER; note = 2'-deoxy-2'-fluoroguanosine-3'-phosphate
  modified_base 10: mod_base = OTHER; note = 2'-deoxy-2'-fluoroadenosine-3'-phosphate
  modified_base 11: mod_base = OTHER; note = 2'-deoxy-2'-fluoroadenosine-3'-phosphate
  modified_base 12: mod_base = OTHER; note = 2'-O-methylguanosine-3'-phosphate
  modified_base 13: mod_base = OTHER; note = 2'-O-methylguanosine-3'-phosphate
  modified_base 14: mod_base = OTHER; note = 2'-O-methyladenosine-3'-phosphate
  modified_base 15: mod_base = OTHER; note = 2'-O-methyladenosine-3'-phosphate
  modified_base 16: mod_base = OTHER; note = 2'-O-methylguanosine-3'-phosphate
  modified_base 17: mod_base = OTHER; note = 2'-O-methyladenosine-3'-phosphate
  modified_base 18: mod_base = OTHER; note = 2'-O-methylguanosine-3'-phosphate
  modified_base 19: mod_base = OTHER; note = 2'-O-methyladenosine-3'-phosphate
  modified_base 20: mod_base = OTHER; note = 2'-O-methyladenosine-3'-phosphate
  modified_base 21: mod_base = OTHER; note = 2'-O-methyladenosine
catgtttagaaggaagagaaa

SEQ ID NO: 4453 - RNA, 21 nt, synthetic construct
  source 1..21: mol_type = other RNA
  modified_base 1: mod_base = OTHER; note = 2'-O-methyluridine-3'-phosphate
  modified_base 2: mod_base = OTHER; note = 2'-O-methylguanosine-3'-phosphate
  modified_base 3: mod_base = OTHER; note = 2'-O-methyluridine-3'-phosphate
  modified_base 4: mod_base = OTHER; note = 2'-O-methyluridine-3'-phosphate
  modified_base 5: mod_base = OTHER; note = 2'-O-methyluridine-3'-phosphate
  modified_base 6: mod_base = OTHER; note = 2'-O-methyladenosine-3'-phosphate
  modified_base 7: mod_base = OTHER; note = 2'-deoxy-2'-fluoroguanosine-3'-phosphate
  modified_base 8: mod_base = OTHER; note = 2'-O-methyladenosine-3'-phosphate
  modified_base 9: mod_base = OTHER; note = 2'-deoxy-2'-fluoroadenosine-3'-phosphate
  modified_base 10: mod_base = OTHER; note = 2'-deoxy-2'-fluoroguanosine-3'-phosphate
  modified_base 11: mod_base = OTHER; note = 2'-deoxy-2'-fluoroguanosine-3'-phosphate
  modified_base 12: mod_base = OTHER; note = 2'-O-methyladenosine-3'-phosphate
  modified_base 13: mod_base = OTHER; note = 2'-O-methyladenosine-3'-phosphate
  modified_base 14: mod_base = OTHER; note = 2'-O-methylguanosine-3'-phosphate
  modified_base 15: mod_base = OTHER; note = 2'-O-methyladenosine-3'-phosphate
  modified_base 16: mod_base = OTHER; note = 2'-O-methylguanosine-3'-phosphate
  modified_base 17: mod_base = OTHER; note = 2'-O-methyladenosine-3'-phosphate
  modified_base 18: mod_base = OTHER; note = 2'-O-methyladenosine-3'-phosphate
  modified_base 19: mod_base = OTHER; note = 2'-O-methyladenosine-3'-phosphate
  modified_base 20: mod_base = OTHER; note = 2'-O-methylguanosine-3'-phosphate
  modified_base 21: mod_base = OTHER; note = 2'-O-methyladenosine
tgtttagaaggaagagaaaga

SEQ ID NO: 4454 - RNA, 21 nt, synthetic construct
  source 1..21: mol_type = other RNA
  modified_base 1: mod_base = OTHER; note = 2'-O-methylguanosine-3'-phosphate
  modified_base 2: mod_base = OTHER; note = 2'-O-methyluridine-3'-phosphate
  modified_base 3: mod_base = OTHER; note = 2'-O-methyluridine-3'-phosphate
  modified_base 4: mod_base = OTHER; note = 2'-O-methyluridine-3'-phosphate
  modified_base 5: mod_base = OTHER; note = 2'-O-methyladenosine-3'-phosphate
  modified_base 6: mod_base = OTHER; note = 2'-O-methylguanosine-3'-phosphate
  modified_base 7: mod_base = OTHER; note = 2'-deoxy-2'-fluoroadenosine-3'-phosphate
  modified_base 8: mod_base = OTHER; note = 2'-O-methyladenosine-3'-phosphate
  modified_base 9: mod_base = OTHER; note = 2'-deoxy-2'-fluoroguanosine-3'-phosphate
  modified_base 10: mod_base = OTHER; note = 2'-deoxy-2'-fluoroguanosine-3'-phosphate
  modified_base 11: mod_base = OTHER; note = 2'-deoxy-2'-fluoroadenosine-3'-phosphate
  modified_base 12: mod_base = OTHER; note = 2'-O-methyladenosine-3'-phosphate
  modified_base 13: mod_base = OTHER; note = 2'-O-methylguanosine-3'-phosphate
  modified_base 14: mod_base = OTHER; note = 2'-O-methyladenosine-3'-phosphate
  modified_base 15: mod_base = OTHER; note = 2'-O-methylguanosine-3'-phosphate
  modified_base 16: mod_base = OTHER; note = 2'-O-methyladenosine-3'-phosphate
  modified_base 17: mod_base = OTHER; note = 2'-O-methyladenosine-3'-phosphate
  modified_base 18: mod_base = OTHER; note = 2'-O-methyladenosine-3'-phosphate
  modified_base 19: mod_base = OTHER; note = 2'-O-methylguanosine-3'-phosphate
  modified_base 20: mod_base = OTHER; note = 2'-O-methylguanosine-3'-phosphate
  modified_base 21: mod_base = OTHER; note = 2'-O-methyladenosine
gtttagaaggaagagaaagga

SEQ ID NO: 4455 - RNA, 21 nt, synthetic construct
  source 1..21: mol_type = other RNA
  modified_base 1: mod_base = OTHER; note = 2'-O-methyluridine-3'-phosphate
  modified_base 2: mod_base = OTHER; note = 2'-O-methyluridine-3'-phosphate
  modified_base 3: mod_base = OTHER; note = 2'-O-methyladenosine-3'-phosphate
  modified_base 4: mod_base = OTHER; note = 2'-O-methylguanosine-3'-phosphate
  modified_base 5: mod_base = OTHER; note = 2'-O-methyladenosine-3'-phosphate
  modified_base 6: mod_base = OTHER; note = 2'-O-methyladenosine-3'-phosphate
  modified_base 7: mod_base = OTHER; note = 2'-deoxy-2'-fluoroguanosine-3'-phosphate
  modified_base 8: mod_base = OTHER; note = 2'-O-methylguanosine-3'-phosphate
  modified_base 9: mod_base = OTHER; note = 2'-deoxy-2'-fluoroadenosine-3'-phosphate
  modified_base 10: mod_base = OTHER; note = 2'-deoxy-2'-fluoroadenosine-3'-phosphate
  modified_base 11: mod_base = OTHER; note = 2'-deoxy-2'-fluoroguanosine-3'-phosphate
  modified_base 12: mod_base = OTHER; note = 2'-O-methyladenosine-3'-phosphate
  modified_base 13: mod_base = OTHER; note = 2'-O-methylguanosine-3'-phosphate
  modified_base 14: mod_base = OTHER; note = 2'-O-methyladenosine-3'-phosphate
  modified_base 15: mod_base = OTHER; note = 2'-O-methyladenosine-3'-phosphate
  modified_base 16: mod_base = OTHER; note = 2'-O-methyladenosine-3'-phosphate
  modified_base 17: mod_base = OTHER; note = 2'-O-methylguanosine-3'-phosphate
  modified_base 18: mod_base = OTHER; note = 2'-O-methylguanosine-3'-phosphate
  modified_base 19: mod_base = OTHER; note = 2'-O-methyladenosine-3'-phosphate
  modified_base 20: mod_base = OTHER; note = 2'-O-methylcytidine-3'-phosphate
  modified_base 21: mod_base = OTHER; note = 2'-O-methyladenosine
ttagaaggaagagaaaggaca

SEQ ID NO: 4456 - RNA, 21 nt, synthetic construct
  source 1..21: mol_type = other RNA
  modified_base 1: mod_base = OTHER; note = 2'-O-methyluridine-3'-phosphate
  modified_base 2: mod_base = OTHER; note = 2'-O-methyladenosine-3'-phosphate
  modified_base 3: mod_base = OTHER; note = 2'-O-methylguanosine-3'-phosphate
  modified_base 4: mod_base = OTHER; note = 2'-O-methyladenosine-3'-phosphate
  modified_base 5: mod_base = OTHER; note = 2'-O-methyladenosine-3'-phosphate
  modified_base 6: mod_base = OTHER; note = 2'-O-methylguanosine-3'-phosphate
  modified_base 7: mod_base = OTHER; note = 2'-deoxy-2'-fluoroguanosine-3'-phosphate
  modified_base 8: mod_base = OTHER; note = 2'-O-methyladenosine-3'-phosphate
  modified_base 9: mod_base = OTHER; note = 2'-deoxy-2'-fluoroadenosine-3'-phosphate
  modified_base 10: mod_base = OTHER; note = 2'-deoxy-2'-fluoroguanosine-3'-phosphate
  modified_base 11: mod_base = OTHER; note = 2'-deoxy-2'-fluoroadenosine-3'-phosphate
  modified_base 12: mod_base = OTHER; note = 2'-O-methylguanosine-3'-phosphate
  modified_base 13: mod_base = OTHER; note = 2'-O-methyladenosine-3'-phosphate
  modified_base 14: mod_base = OTHER; note = 2'-O-methyladenosine-3'-phosphate
  modified_base 15: mod_base = OTHER; note = 2'-O-methyladenosine-3'-phosphate
  modified_base 16: mod_base = OTHER; note = 2'-O-methylguanosine-3'-phosphate
  modified_base 17: mod_base = OTHER; note = 2'-O-methylguanosine-3'-phosphate
  modified_base 18: mod_base = OTHER; note = 2'-O-methyladenosine-3'-phosphate
  modified_base 19: mod_base = OTHER; note = 2'-O-methylcytidine-3'-phosphate
  modified_base 20: mod_base = OTHER; note = 2'-O-methyladenosine-3'-phosphate
  modified_base 21: mod_base = OTHER; note = 2'-O-methyladenosine
tagaaggaagagaaaggacaa

SEQ ID NO: 4457 - RNA, 21 nt, synthetic construct
  source 1..21: mol_type = other RNA
  modified_base 1: mod_base = OTHER; note = 2'-O-methyladenosine-3'-phosphate
  modified_base 2: mod_base = OTHER; note = 2'-O-methylguanosine-3'-phosphate
  modified_base 3: mod_base = OTHER; note = 2'-O-methyladenosine-3'-phosphate
  modified_base 4: mod_base = OTHER; note = 2'-O-methyladenosine-3'-phosphate
  modified_base 5: mod_base = OTHER; note = 2'-O-methylguanosine-3'-phosphate
  modified_base 6: mod_base = OTHER; note = 2'-O-methylguanosine-3'-phosphate
  modified_base 7: mod_base = OTHER; note = 2'-deoxy-2'-fluoroadenosine-3'-phosphate
  modified_base 8: mod_base = OTHER; note = 2'-O-methyladenosine-3'-phosphate
  modified_base 9: mod_base = OTHER; note = 2'-deoxy-2'-fluoroguanosine-3'-phosphate
  modified_base 10: mod_base = OTHER; note = 2'-deoxy-2'-fluoroadenosine-3'-phosphate
  modified_base 11: mod_base = OTHER; note = 2'-deoxy-2'-fluoroguanosine-3'-phosphate
  modified_base 12: mod_base = OTHER; note = 2'-O-methyladenosine-3'-phosphate
  modified_base 13: mod_base = OTHER; note = 2'-O-methyladenosine-3'-phosphate
  modified_base 14: mod_base = OTHER; note = 2'-O-methyladenosine-3'-phosphate
  modified_base 15: mod_base = OTHER; note = 2'-O-methylguanosine-3'-phosphate
  modified_base 16: mod_base = OTHER; note = 2'-O-methylguanosine-3'-phosphate
  modified_base 17: mod_base = OTHER; note = 2'-O-methyladenosine-3'-phosphate
  modified_base 18: mod_base = OTHER; note = 2'-O-methylcytidine-3'-phosphate
  modified_base 19: mod_base = OTHER; note = 2'-O-methyladenosine-3'-phosphate
  modified_base 20: mod_base = OTHER; note = 2'-O-methyladenosine-3'-phosphate
  modified_base 21: mod_base = OTHER; note = 2'-O-methyladenosine
agaaggaagagaaaggacaaa

SEQ ID NO: 4458 - RNA, 21 nt, synthetic construct
  source 1..21: mol_type = other RNA
  modified_base 1: mod_base = OTHER; note = 2'-O-methylguanosine-3'-phosphate
  modified_base 2: mod_base = OTHER; note = 2'-O-methyladenosine-3'-phosphate
  modified_base 3: mod_base = OTHER; note = 2'-O-methyladenosine-3'-phosphate
  modified_base 4: mod_base = OTHER; note = 2'-O-methylguanosine-3'-phosphate
  modified_base 5: mod_base = OTHER; note = 2'-O-methylguanosine-3'-phosphate
  modified_base 6: mod_base = OTHER; note = 2'-O-methyladenosine-3'-phosphate
  modified_base 7: mod_base = OTHER; note = 2'-deoxy-2'-fluoroadenosine-3'-phosphate
  modified_base 8: mod_base = OTHER; note = 2'-O-methylguanosine-3'-phosphate
  modified_base 9: mod_base = OTHER; note = 2'-deoxy-2'-fluoroadenosine-3'-phosphate
  modified_base 10: mod_base = OTHER; note = 2'-deoxy-2'-fluoroguanosine-3'-phosphate
  modified_base 11: mod_base = OTHER; note = 2'-deoxy-2'-fluoroadenosine-3'-phosphate
  modified_base 12: mod_base = OTHER; note = 2'-O-methyladenosine-3'-phosphate
  modified_base 13: mod_base = OTHER; note = 2'-O-methyladenosine-3'-phosphate
  modified_base 14: mod_base = OTHER; note = 2'-O-methylguanosine-3'-phosphate
  modified_base 15: mod_base = OTHER; note = 2'-O-methylguanosine-3'-phosphate
  modified_base 16: mod_base = OTHER; note = 2'-O-methyladenosine-3'-phosphate
  modified_base 17: mod_base = OTHER; note = 2'-O-methylcytidine-3'-phosphate
  modified_base 18: mod_base = OTHER; note = 2'-O-methyladenosine-3'-phosphate
  modified_base 19: mod_base = OTHER; note = 2'-O-methyladenosine-3'-phosphate
  modified_base 20: mod_base = OTHER; note = 2'-O-methyladenosine-3'-phosphate
  modified_base 21: mod_base = OTHER; note = 2'-O-methyladenosine
gaaggaagagaaaggacaaaa

SEQ ID NO: 4459 - RNA, 21 nt, synthetic construct
  source 1..21: mol_type = other RNA
  modified_base 1: mod_base = OTHER; note = 2'-O-methyladenosine-3'-phosphate
  modified_base 2: mod_base = OTHER; note = 2'-O-methyladenosine-3'-phosphate
  modified_base 3: mod_base = OTHER; note = 2'-O-methylguanosine-3'-phosphate
  modified_base 4: mod_base = OTHER; note = 2'-O-methylguanosine-3'-phosphate
  modified_base 5: mod_base = OTHER; note = 2'-O-methylcytidine-3'-phosphate
  modified_base 6: mod_base = OTHER; note = 2'-O-methyladenosine-3'-phosphate
  modified_base 7: mod_base = OTHER; note = 2'-deoxy-2'-fluorocytidine-3'-phosphate
  modified_base 8: mod_base = OTHER; note = 2'-O-methyladenosine-3'-phosphate
  modified_base 9: mod_base = OTHER; note = 2'-deoxy-2'-fluorocytidine-3'-phosphate
  modified_base 10: mod_base = OTHER; note = 2'-deoxy-2'-fluoroguanosine-3'-phosphate
  modified_base 11: mod_base = OTHER; note = 2'-deoxy-2'-fluorouridine-3'-phosphate
  modified_base 12: mod_base = OTHER; note = 2'-O-methyluridine-3'-phosphate
  modified_base 13: mod_base = OTHER; note = 2'-O-methyluridine-3'-phosphate
  modified_base 14: mod_base = OTHER; note = 2'-O-methyluridine-3'-phosphate
  modified_base 15: mod_base = OTHER; note = 2'-O-methyladenosine-3'-phosphate
  modified_base 16: mod_base = OTHER; note = 2'-O-methylcytidine-3'-phosphate
  modified_base 17: mod_base = OTHER; note = 2'-O-methylcytidine-3'-phosphate
  modified_base 18: mod_base = OTHER; note = 2'-O-methyladenosine-3'-phosphate
  modified_base 19: mod_base = OTHER; note = 2'-O-methyluridine-3'-phosphate
  modified_base 20: mod_base = OTHER; note = 2'-O-methyluridine-3'-phosphate
  modified_base 21: mod_base = OTHER; note = 2'-O-methyladenosine
aaggcacacgttttaccatta

SEQ ID NO: 4460 - RNA, 21 nt, synthetic construct
  source 1..21: mol_type = other RNA
  modified_base 1: mod_base = OTHER; note = 2'-O-methyladenosine-3'-phosphate
  modified_base 2: mod_base = OTHER; note = 2'-O-methylguanosine-3'-phosphate
  modified_base 3: mod_base = OTHER; note = 2'-O-methylguanosine-3'-phosphate
  modified_base 4: mod_base = OTHER; note = 2'-O-methylcytidine-3'-phosphate
  modified_base 5: mod_base = OTHER; note = 2'-O-methyladenosine-3'-phosphate
  modified_base 6: mod_base = OTHER; note = 2'-O-methylcytidine-3'-phosphate
  modified_base 7: mod_base = OTHER; note = 2'-deoxy-2'-fluoroadenosine-3'-phosphate
  modified_base 8: mod_base = OTHER; note = 2'-O-methylcytidine-3'-phosphate
  modified_base 9: mod_base = OTHER; note = 2'-deoxy-2'-fluoroguanosine-3'-phosphate
  modified_base 10: mod_base = OTHER; note = 2'-deoxy-2'-fluorouridine-3'-phosphate
  modified_base 11: mod_base = OTHER; note = 2'-deoxy-2'-fluorouridine-3'-phosphate
  modified_base 12: mod_base = OTHER; note = 2'-O-methyluridine-3'-phosphate
  modified_base 13: mod_base = OTHER; note = 2'-O-methyluridine-3'-phosphate
  modified_base 14: mod_base = OTHER; note = 2'-O-methyladenosine-3'-phosphate
  modified_base 15: mod_base = OTHER; note = 2'-O-methylcytidine-3'-phosphate
  modified_base 16: mod_base = OTHER; note = 2'-O-methylcytidine-3'-phosphate
  modified_base 17: mod_base = OTHER; note = 2'-O-methyladenosine-3'-phosphate
  modified_base 18: mod_base = OTHER; note = 2'-O-methyluridine-3'-phosphate
  modified_base 19: mod_base = OTHER; note = 2'-O-methyluridine-3'-phosphate
  modified_base 20: mod_base = OTHER; note = 2'-O-methyluridine-3'-phosphate
  modified_base 21: mod_base = OTHER; note = 2'-O-methyladenosine
aggcacacgttttaccattta

SEQ ID NO: 4461 - RNA, 21 nt, synthetic construct
  source 1..21: mol_type = other RNA
  modified_base 1: mod_base = OTHER; note = 2'-O-methylguanosine-3'-phosphate
  modified_base 2: mod_base = OTHER; note = 2'-O-methylguanosine-3'-phosphate
  modified_base 3: mod_base = OTHER; note = 2'-O-methylcytidine-3'-phosphate
  modified_base 4: mod_base = OTHER; note = 2'-O-methyladenosine-3'-phosphate
  modified_base 5: mod_base = OTHER; note = 2'-O-methylcytidine-3'-phosphate
  modified_base 6: mod_base = OTHER; note = 2'-O-methyladenosine-3'-phosphate
  modified_base 7: mod_base = OTHER; note = 2'-deoxy-2'-fluorocytidine-3'-phosphate
  modified_base 8: mod_base = OTHER; note = 2'-O-methylguanosine-3'-phosphate
  modified_base 9: mod_base = OTHER; note = 2'-deoxy-2'-fluorouridine-3'-phosphate
  modified_base 10: mod_base = OTHER; note = 2'-deoxy-2'-fluorouridine-3'-phosphate
  modified_base 11: mod_base = OTHER; note = 2'-deoxy-2'-fluorouridine-3'-phosphate
  modified_base 12: mod_base = OTHER; note = 2'-O-methyluridine-3'-phosphate
  modified_base 13: mod_base = OTHER; note = 2'-O-methyladenosine-3'-phosphate
  modified_base 14: mod_base = OTHER; note = 2'-O-methylcytidine-3'-phosphate
  modified_base 15: mod_base = OTHER; note = 2'-O-methylcytidine-3'-phosphate
  modified_base 16: mod_base = OTHER; note = 2'-O-methyladenosine-3'-phosphate
  modified_base 17: mod_base = OTHER; note = 2'-O-methyluridine-3'-phosphate
  modified_base 18: mod_base = OTHER; note = 2'-O-methyluridine-3'-phosphate
  modified_base 19: mod_base = OTHER; note = 2'-O-methyluridine-3'-phosphate
  modified_base 20: mod_base = OTHER; note = 2'-O-methyladenosine-3'-phosphate
  modified_base 21: mod_base = OTHER; note = 2'-O-methyladenosine
ggcacacgttttaccatttaa

SEQ ID NO: 4462 - RNA, 21 nt, synthetic construct
  source 1..21: mol_type = other RNA
  modified_base 1: mod_base = OTHER; note = 2'-O-methylguanosine-3'-phosphate
  modified_base 2: mod_base = OTHER; note = 2'-O-methylcytidine-3'-phosphate
  modified_base 3: mod_base = OTHER; note = 2'-O-methyladenosine-3'-phosphate
  modified_base 4: mod_base = OTHER; note = 2'-O-methylcytidine-3'-phosphate
  modified_base 5: mod_base = OTHER; note = 2'-O-methyladenosine-3'-phosphate
  modified_base 6: mod_base = OTHER; note = 2'-O-methylcytidine-3'-phosphate
  modified_base 7: mod_base = OTHER; note = 2'-deoxy-2'-fluoroguanosine-3'-phosphate
  modified_base 8: mod_base = OTHER; note = 2'-O-methyluridine-3'-phosphate
  modified_base 9: mod_base = OTHER; note = 2'-deoxy-2'-fluorouridine-3'-phosphate
  modified_base 10: mod_base = OTHER; note = 2'-deoxy-2'-fluorouridine-3'-phosphate
  modified_base 11: mod_base = OTHER; note = 2'-deoxy-2'-fluorouridine-3'-phosphate
  modified_base 12: mod_base = OTHER; note = 2'-O-methyladenosine-3'-phosphate
  modified_base 13: mod_base = OTHER; note = 2'-O-methylcytidine-3'-phosphate
  modified_base 14: mod_base = OTHER; note = 2'-O-methylcytidine-3'-phosphate
  modified_base 15: mod_base = OTHER; note = 2'-O-methyladenosine-3'-phosphate
  modified_base 16: mod_base = OTHER; note = 2'-O-methyluridine-3'-phosphate
  modified_base 17: mod_base = OTHER; note = 2'-O-methyluridine-3'-phosphate
  modified_base 18: mod_base = OTHER; note = 2'-O-methyluridine-3'-phosphate
  modified_base 19: mod_base = OTHER; note = 2'-O-methyladenosine-3'-phosphate
  modified_base 20: mod_base = OTHER; note = 2'-O-methyladenosine-3'-phosphate
  modified_base 21: mod_base = OTHER; note = 2'-O-methyladenosine
gcacacgttttaccatttaaa

SEQ ID NO: 4463 - RNA, 21 nt, synthetic construct
  source 1..21: mol_type = other RNA
  modified_base 1: mod_base = OTHER; note = 2'-O-methylcytidine-3'-phosphate
  modified_base 2: mod_base = OTHER; note = 2'-O-methyladenosine-3'-phosphate
  modified_base 3: mod_base = OTHER; note = 2'-O-methylcytidine-3'-phosphate
  modified_base 4: mod_base = OTHER; note = 2'-O-methyladenosine-3'-phosphate
  modified_base 5: mod_base = OTHER; note = 2'-O-methylcytidine-3'-phosphate
  modified_base 6: mod_base = OTHER; note = 2'-O-methylguanosine-3'-phosphate
  modified_base 7: mod_base = OTHER; note = 2'-deoxy-2'-fluorouridine-3'-phosphate
  modified_base 8: mod_base = OTHER; note = 2'-O-methyluridine-3'-phosphate
  modified_base 9: mod_base = OTHER; note = 2'-deoxy-2'-fluorouridine-3'-phosphate
  modified_base 10: mod_base = OTHER; note = 2'-deoxy-2'-fluorouridine-3'-phosphate
  modified_base 11: mod_base = OTHER; note = 2'-deoxy-2'-fluoroadenosine-3'-phosphate
  modified_base 12: mod_base = OTHER; note = 2'-O-methylcytidine-3'-phosphate
  modified_base 13: mod_base = OTHER; note = 2'-O-methylcytidine-3'-phosphate
  modified_base 14: mod_base = OTHER; note = 2'-O-methyladenosine-3'-phosphate
  modified_base 15: mod_base = OTHER; note = 2'-O-methyluridine-3'-phosphate
  modified_base 16: mod_base = OTHER; note = 2'-O-methyluridine-3'-phosphate
  modified_base 17: mod_base = OTHER; note = 2'-O-methyluridine-3'-phosphate
  modified_base 18: mod_base = OTHER; note = 2'-O-methyladenosine-3'-phosphate
  modified_base 19: mod_base = OTHER; note = 2'-O-methyladenosine-3'-phosphate
  modified_base 20: mod_base = OTHER; note = 2'-O-methyladenosine-3'-phosphate
  modified_base 21: mod_base = OTHER; note = 2'-O-methyladenosine
cacacgttttaccatttaaaa

SEQ ID NO: 4464 - RNA, 21 nt, synthetic construct
  source 1..21: mol_type = other RNA
  modified_base 1: mod_base = OTHER; note = 2'-O-methyladenosine-3'-phosphate
  modified_base 2: mod_base = OTHER; note = 2'-O-methylcytidine-3'-phosphate
  modified_base 3: mod_base = OTHER; note = 2'-O-methyladenosine-3'-phosphate
  modified_base 4: mod_base = OTHER; note = 2'-O-methylcytidine-3'-phosphate
  modified_base 5: mod_base = OTHER; note = 2'-O-methylguanosine-3'-phosphate
  modified_base 6: mod_base = OTHER; note = 2'-O-methyluridine-3'-phosphate
  modified_base 7: mod_base = OTHER; note = 2'-deoxy-2'-fluorouridine-3'-phosphate
  modified_base 8: mod_base = OTHER; note = 2'-O-methyluridine-3'-phosphate
  modified_base 9: mod_base = OTHER; note = 2'-deoxy-2'-fluorouridine-3'-phosphate
  modified_base 10: mod_base = OTHER; note = 2'-deoxy-2'-fluoroadenosine-3'-phosphate
  modified_base 11: mod_base = OTHER; note = 2'-deoxy-2'-fluorocytidine-3'-phosphate
  modified_base 12: mod_base = OTHER; note = 2'-O-methylcytidine-3'-phosphate
  modified_base 13: mod_base = OTHER; note = 2'-O-methyladenosine-3'-phosphate
  modified_base 14: mod_base = OTHER; note = 2'-O-methyluridine-3'-phosphate
  modified_base 15: mod_base = OTHER; note = 2'-O-methyluridine-3'-phosphate
  modified_base 16: mod_base = OTHER; note = 2'-O-methyluridine-3'-phosphate
  modified_base 17: mod_base = OTHER; note = 2'-O-methyladenosine-3'-phosphate
  modified_base 18: mod_base = OTHER; note = 2'-O-methyladenosine-3'-phosphate
  modified_base 19: mod_base = OTHER; note = 2'-O-methyladenosine-3'-phosphate
  modified_base 20: mod_base = OTHER; note = 2'-O-methyladenosine-3'-phosphate
  modified_base 21: mod_base = OTHER; note = 2'-O-methyladenosine
acacgttttaccatttaaaaa

SEQ ID NO: 4465 - RNA, 21 nt, synthetic construct
  source 1..21: mol_type = other RNA
  modified_base 1: mod_base = OTHER; note = 2'-O-methylcytidine-3'-phosphate
  modified_base 2: mod_base = OTHER; note = 2'-O-methyladenosine-3'-phosphate
  modified_base 3: mod_base = OTHER; note = 2'-O-methylcytidine-3'-phosphate
  modified_base 4: mod_base = OTHER; note = 2'-O-methylguanosine-3'-phosphate
  modified_base 5: mod_base = OTHER; note = 2'-O-methyluridine-3'-phosphate
  modified_base 6: mod_base = OTHER; note = 2'-O-methyluridine-3'-phosphate
  modified_base 7: mod_base = OTHER; note = 2'-deoxy-2'-fluorouridine-3'-phosphate
  modified_base 8: mod_base = OTHER; note = 2'-O-methyluridine-3'-phosphate
  modified_base 9: mod_base = OTHER; note = 2'-deoxy-2'-fluoroadenosine-3'-phosphate
  modified_base 10: mod_base = OTHER; note = 2'-deoxy-2'-fluorocytidine-3'-phosphate
  modified_base 11: mod_base = OTHER; note = 2'-deoxy-2'-fluorocytidine-3'-phosphate
  modified_base 12: mod_base = OTHER; note = 2'-O-methyladenosine-3'-phosphate
  modified_base 13: mod_base = OTHER; note = 2'-O-methyluridine-3'-phosphate
  modified_base 14: mod_base = OTHER; note = 2'-O-methyluridine-3'-phosphate
  modified_base 15: mod_base = OTHER; note = 2'-O-methyluridine-3'-phosphate
  modified_base 16: mod_base = OTHER; note = 2'-O-methyladenosine-3'-phosphate
  modified_base 17: mod_base = OTHER; note = 2'-O-methyladenosine-3'-phosphate
  modified_base 18: mod_base = OTHER; note = 2'-O-methyladenosine-3'-phosphate
  modified_base 19: mod_base = OTHER; note = 2'-O-methyladenosine-3'-phosphate
  modified_base 20: mod_base = OTHER; note = 2'-O-methyluridine-3'-phosphate
  modified_base 21: mod_base = OTHER; note = 2'-O-methyladenosine
cacgttttaccatttaaaata

SEQ ID NO: 4466 - RNA, 21 nt, synthetic construct
  source 1..21: mol_type = other RNA
  modified_base 1: mod_base = OTHER; note = 2'-O-methyladenosine-3'-phosphate
  modified_base 2: mod_base = OTHER; note = 2'-O-methylcytidine-3'-phosphate
  modified_base 3: mod_base = OTHER; note = 2'-O-methylguanosine-3'-phosphate
  modified_base 4: mod_base = OTHER; note = 2'-O-methyluridine-3'-phosphate
  modified_base 5: mod_base = OTHER; note = 2'-O-methyluridine-3'-phosphate
  modified_base 6: mod_base = OTHER; note = 2'-O-methyluridine-3'-phosphate
  modified_base 7: mod_base = OTHER; note = 2'-deoxy-2'-fluorouridine-3'-phosphate
  modified_base 8: mod_base = OTHER; note = 2'-O-methyladenosine-3'-phosphate
  modified_base 9: mod_base = OTHER; note = 2'-deoxy-2'-fluorocytidine-3'-phosphate
  modified_base 10: mod_base = OTHER; note = 2'-deoxy-2'-fluorocytidine-3'-phosphate
  modified_base 11: mod_base = OTHER; note = 2'-deoxy-2'-fluoroadenosine-3'-phosphate
  modified_base 12: mod_base = OTHER; note = 2'-O-methyluridine-3'-phosphate
  modified_base 13: mod_base = OTHER; note = 2'-O-methyluridine-3'-phosphate
  modified_base 14: mod_base = OTHER; note = 2'-O-methyluridine-3'-phosphate
  modified_base 15: mod_base = OTHER; note = 2'-O-methyladenosine-3'-phosphate
  modified_base 16: mod_base = OTHER; note = 2'-O-methyladenosine-3'-phosphate
  modified_base 17: mod_base = OTHER; note = 2'-O-methyladenosine-3'-phosphate
  modified_base 18: mod_base = OTHER; note = 2'-O-methyladenosine-3'-phosphate
  modified_base 19: mod_base = OTHER; note = 2'-O-methyluridine-3'-phosphate
  modified_base 20: mod_base = OTHER; note = 2'-O-methyladenosine-3'-phosphate
  modified_base 21: mod_base = OTHER; note = 2'-O-methyladenosine
acgttttaccatttaaaataa

SEQ ID NO: 4467 - RNA, 21 nt, synthetic construct
  source 1..21: mol_type = other RNA
  modified_base 1: mod_base = OTHER; note = 2'-O-methylcytidine-3'-phosphate
  modified_base 2: mod_base = OTHER; note = 2'-O-methylguanosine-3'-phosphate
  modified_base 3: mod_base = OTHER; note = 2'-O-methyluridine-3'-phosphate
  modified_base 4: mod_base = OTHER; note = 2'-O-methyluridine-3'-phosphate
  modified_base 5: mod_base = OTHER; note = 2'-O-methyluridine-3'-phosphate
  modified_base 6: mod_base = OTHER; note = 2'-O-methyluridine-3'-phosphate
  modified_base 7: mod_base = OTHER; note = 2'-deoxy-2'-fluoroadenosine-3'-phosphate
  modified_base 8: mod_base = OTHER; note = 2'-O-methylcytidine-3'-phosphate
  modified_base 9: mod_base = OTHER; note = 2'-deoxy-2'-fluorocytidine-3'-phosphate
  modified_base 10: mod_base = OTHER; note = 2'-deoxy-2'-fluoroadenosine-3'-phosphate
  modified_base 11: mod_base = OTHER; note = 2'-deoxy-2'-fluorouridine-3'-phosphate
  modified_base 12: mod_base = OTHER; note = 2'-O-methyluridine-3'-phosphate
  modified_base 13: mod_base = OTHER; note = 2'-O-methyluridine-3'-phosphate
  modified_base 14: mod_base = OTHER; note = 2'-O-methyladenosine-3'-phosphate
  modified_base 15: mod_base = OTHER; note = 2'-O-methyladenosine-3'-phosphate
  modified_base 16: mod_base = OTHER; note = 2'-O-methyladenosine-3'-phosphate
  modified_base 17: mod_base = OTHER; note = 2'-O-methyladenosine-3'-phosphate
  modified_base 18: mod_base = OTHER; note = 2'-O-methyluridine-3'-phosphate
  modified_base 19: mod_base = OTHER; note = 2'-O-methyladenosine-3'-phosphate
  modified_base 20: mod_base = OTHER; note = 2'-O-methyluridine-3'-phosphate
  modified_base 21: mod_base = OTHER; note = 2'-O-methyladenosine
cgttttaccatttaaaatata

SEQ ID NO: 4468 - RNA, 21 nt, synthetic construct
  source 1..21: mol_type = other RNA
  modified_base 1: mod_base = OTHER; note = 2'-O-methylguanosine-3'-phosphate
  modified_base 2: mod_base = OTHER; note = 2'-O-methyluridine-3'-phosphate
  modified_base 3: mod_base = OTHER; note = 2'-O-methyluridine-3'-phosphate
  modified_base 4: mod_base = OTHER; note = 2'-O-methyluridine-3'-phosphate
  modified_base 5: mod_base = OTHER; note = 2'-O-methyluridine-3'-phosphate
  modified_base 6: mod_base = OTHER; note = 2'-O-methyladenosine-3'-phosphate
  modified_base 7: mod_base = OTHER; note = 2'-deoxy-2'-fluorocytidine-3'-phosphate
  modified_base 8: mod_base = OTHER; note = 2'-O-methylcytidine-3'-phosphate
  modified_base 9: mod_base = OTHER; note = 2'-deoxy-2'-fluoroadenosine-3'-phosphate
  modified_base 10: mod_base = OTHER; note = 2'-deoxy-2'-fluorouridine-3'-phosphate
  modified_base 11: mod_base = OTHER; note = 2'-deoxy-2'-fluorouridine-3'-phosphate
  modified_base 12: mod_base = OTHER; note = 2'-O-methyluridine-3'-phosphate
  modified_base 13: mod_base = OTHER; note = 2'-O-methyladenosine-3'-phosphate
  modified_base 14: mod_base = OTHER; note = 2'-O-methyladenosine-3'-phosphate
  modified_base 15: mod_base = OTHER; note = 2'-O-methyladenosine-3'-phosphate
  modified_base 16: mod_base = OTHER; note = 2'-O-methyladenosine-3'-phosphate
  modified_base 17: mod_base = OTHER; note = 2'-O-methyluridine-3'-phosphate
  modified_base 18: mod_base = OTHER; note = 2'-O-methyladenosine-3'-phosphate
  modified_base 19: mod_base = OTHER; note = 2'-O-methyluridine-3'-phosphate
  modified_base 20: mod_base = OTHER; note = 2'-O-methyluridine-3'-phosphate
  modified_base 21: mod_base = OTHER; note = 2'-O-methyladenosine
gttttaccatttaaaatatta

SEQ ID NO: 4469 - RNA, 21 nt, synthetic construct
  source 1..21: mol_type = other RNA
  modified_base 1: mod_base = OTHER; note = 2'-O-methyluridine-3'-phosphate
  modified_base 2: mod_base = OTHER; note = 2'-O-methyluridine-3'-phosphate
  modified_base 3: mod_base = OTHER; note = 2'-O-methyluridine-3'-phosphate
  modified_base 4: mod_base = OTHER; note = 2'-O-methyluridine-3'-phosphate
  modified_base 5: mod_base = OTHER; note = 2'-O-methyladenosine-3'-phosphate
  modified_base 6: mod_base = OTHER; note = 2'-O-methylcytidine-3'-phosphate
  modified_base 7: mod_base = OTHER; note = 2'-deoxy-2'-fluorocytidine-3'-phosphate
  modified_base 8: mod_base = OTHER; note = 2'-O-methyladenosine-3'-phosphate
  modified_base 9: mod_base = OTHER; note = 2'-deoxy-2'-fluorouridine-3'-phosphate
  modified_base 10: mod_base = OTHER; note = 2'-deoxy-2'-fluorouridine-3'-phosphate
  modified_base 11: mod_base = OTHER; note = 2'-deoxy-2'-fluorouridine-3'-phosphate
  modified_base 12: mod_base = OTHER; note = 2'-O-methyladenosine-3'-phosphate
  modified_base 13: mod_base = OTHER; note = 2'-O-methyladenosine-3'-phosphate
  modified_base 14: mod_base = OTHER; note = 2'-O-methyladenosine-3'-phosphate
  modified_base 15: mod_base = OTHER; note = 2'-O-methyladenosine-3'-phosphate
  modified_base 16: mod_base = OTHER; note = 2'-O-methyluridine-3'-phosphate
  modified_base 17: mod_base = OTHER; note = 2'-O-methyladenosine-3'-phosphate
  modified_base 18: mod_base = OTHER; note = 2'-O-methyluridine-3'-phosphate
  modified_base 19: mod_base = OTHER; note = 2'-O-methyluridine-3'-phosphate
  modified_base 20: mod_base = OTHER; note = 2'-O-methylguanosine-3'-phosphate
  modified_base 21: mod_base = OTHER; note = 2'-O-methyladenosine
ttttaccatttaaaatattga

SEQ ID NO: 4470 - RNA, 21 nt, synthetic construct
  source 1..21: mol_type = other RNA
  modified_base 1: mod_base = OTHER; note = 2'-O-methyluridine-3'-phosphate
  modified_base 2: mod_base = OTHER; note = 2'-O-methyluridine-3'-phosphate
  modified_base 3: mod_base = OTHER; note = 2'-O-methyluridine-3'-phosphate
  modified_base 4: mod_base = OTHER; note = 2'-O-methyladenosine-3'-phosphate
  modified_base 5: mod_base = OTHER; note = 2'-O-methylcytidine-3'-phosphate
  modified_base 6: mod_base = OTHER; note = 2'-O-methylcytidine-3'-phosphate
  modified_base 7: mod_base = OTHER; note = 2'-deoxy-2'-fluoroadenosine-3'-phosphate
  modified_base 8: mod_base = OTHER; note = 2'-O-methyluridine-3'-phosphate
  modified_base 9: mod_base = OTHER; note = 2'-deoxy-2'-fluorouridine-3'-phosphate
  modified_base 10: mod_base = OTHER; note = 2'-deoxy-2'-fluorouridine-3'-phosphate
  modified_base 11: mod_base = OTHER; note = 2'-deoxy-2'-fluoroadenosine-3'-phosphate
  modified_base 12: mod_base = OTHER; note = 2'-O-methyladenosine-3'-phosphate
  modified_base 13: mod_base = OTHER; note = 2'-O-methyladenosine-3'-phosphate
  modified_base 14: mod_base = OTHER; note = 2'-O-methyladenosine-3'-phosphate
  modified_base 15: mod_base = OTHER; note = 2'-O-methyluridine-3'-phosphate
  modified_base 16: mod_base = OTHER; note = 2'-O-methyladenosine-3'-phosphate
  modified_base 17: mod_base = OTHER; note = 2'-O-methyluridine-3'-phosphate
  modified_base 18: mod_base = OTHER; note = 2'-O-methyluridine-3'-phosphate
  modified_base 19: mod_base = OTHER; note = 2'-O-methylguanosine-3'-phosphate
  modified_base 20: mod_base = OTHER; note = 2'-O-methyluridine-3'-phosphate
  modified_base 21: mod_base = OTHER; note = 2'-O-methyladenosine
tttaccatttaaaatattgta

SEQ ID NO: 4471 - RNA, 21 nt, synthetic construct
  source 1..21: mol_type = other RNA
  modified_base 1: mod_base = OTHER; note = 2'-O-methyluridine-3'-phosphate
  modified_base 2: mod_base = OTHER; note = 2'-O-methyluridine-3'-phosphate
  modified_base 3: mod_base = OTHER; note = 2'-O-methyluridine-3'-phosphate
  modified_base 4: mod_base = OTHER; note = 2'-O-methyladenosine-3'-phosphate
  modified_base 5: mod_base = OTHER; note = 2'-O-methyladenosine-3'-phosphate
  modified_base 6: mod_base = OTHER; note = 2'-O-methyladenosine-3'-phosphate
  modified_base 7: mod_base = OTHER; note = 2'-deoxy-2'-fluoroadenosine-3'-phosphate
  modified_base 8: mod_base = OTHER; note = 2'-O-methyluridine-3'-phosphate
  modified_base 9: mod_base = OTHER; note = 2'-deoxy-2'-fluoroadenosine-3'-phosphate
  modified_base 10: mod_base = OTHER; note = 2'-deoxy-2'-fluorouridine-3'-phosphate
  modified_base 11: mod_base = OTHER; note = 2'-deoxy-2'-fluorouridine-3'-phosphate
  modified_base 12: mod_base = OTHER; note = 2'-O-methylguanosine-3'-phosphate
  modified_base 13: mod_base = OTHER; note = 2'-O-methyluridine-3'-phosphate
  modified_base 14: mod_base = OTHER; note = 2'-O-methyluridine-3'-phosphate
  modified_base 15: mod_base = OTHER; note = 2'-O-methyladenosine-3'-phosphate
  modified_base 16: mod_base = OTHER; note = 2'-O-methylcytidine-3'-phosphate
  modified_base 17: mod_base = OTHER; note = 2'-O-methylcytidine-3'-phosphate
  modified_base 18: mod_base = OTHER; note = 2'-O-methyladenosine-3'-phosphate
  modified_base 19: mod_base = OTHER; note = 2'-O-methyladenosine-3'-phosphate
  modified_base 20: mod_base = OTHER; note = 2'-O-methyladenosine-3'-phosphate
  modified_base 21: mod_base = OTHER; note = 2'-O-methyladenosine
tttaaaatattgttaccaaaa

SEQ ID NO: 4472 - RNA, 21 nt, synthetic construct
  source 1..21: mol_type = other RNA
  modified_base 1: mod_base = OTHER; note = 2'-O-methyluridine-3'-phosphate
  modified_base 2: mod_base = OTHER; note = 2'-O-methyluridine-3'-phosphate
  modified_base 3: mod_base = OTHER; note = 2'-O-methyladenosine-3'-phosphate
  modified_base 4: mod_base = OTHER; note = 2'-O-methyladenosine-3'-phosphate
  modified_base 5: mod_base = OTHER; note = 2'-O-methyladenosine-3'-phosphate
  modified_base 6: mod_base = OTHER; note = 2'-O-methyladenosine-3'-phosphate
  modified_base 7: mod_base = OTHER; note = 2'-deoxy-2'-fluorouridine-3'-phosphate
  modified_base 8: mod_base = OTHER; note = 2'-O-methyladenosine-3'-phosphate
  modified_base 9: mod_base = OTHER; note = 2'-deoxy-2'-fluorouridine-3'-phosphate
  modified_base 10: mod_base = OTHER; note = 2'-deoxy-2'-fluorouridine-3'-phosphate
  modified_base 11: mod_base = OTHER; note = 2'-deoxy-2'-fluoroguanosine-3'-phosphate
  modified_base 12: mod_base = OTHER; note = 2'-O-methyluridine-3'-phosphate
  modified_base 13: mod_base = OTHER; note = 2'-O-methyluridine-3'-phosphate
  modified_base 14: mod_base = OTHER; note = 2'-O-methyladenosine-3'-phosphate
  modified_base 15: mod_base = OTHER; note = 2'-O-methylcytidine-3'-phosphate
  modified_base 16: mod_base = OTHER; note = 2'-O-methylcytidine-3'-phosphate
  modified_base 17: mod_base = OTHER; note = 2'-O-methyladenosine-3'-phosphate
  modified_base 18: mod_base = OTHER; note = 2'-O-methyladenosine-3'-phosphate
  modified_base 19: mod_base = OTHER; note = 2'-O-methyladenosine-3'-phosphate
  modified_base 20: mod_base = OTHER; note = 2'-O-methylcytidine-3'-phosphate
  modified_base 21: mod_base = OTHER; note = 2'-O-methyladenosine
ttaaaatattgttaccaaaca

SEQ ID NO: 4473 - RNA, 21 nt, synthetic construct
  source 1..21: mol_type = other RNA
  modified_base 1: mod_base = OTHER; note = 2'-O-methyluridine-3'-phosphate
  modified_base 2: mod_base = OTHER; note = 2'-O-methyladenosine-3'-phosphate
  modified_base 3: mod_base = OTHER; note = 2'-O-methyladenosine-3'-phosphate
  modified_base 4: mod_base = OTHER; note = 2'-O-methyladenosine-3'-phosphate
  modified_base 5: mod_base = OTHER; note = 2'-O-methyladenosine-3'-phosphate
  modified_base 6: mod_base = OTHER; note = 2'-O-methyluridine-3'-phosphate
  modified_base 7: mod_base = OTHER; note = 2'-deoxy-2'-fluoroadenosine-3'-phosphate
  modified_base 8: mod_base = OTHER; note = 2'-O-methyluridine-3'-phosphate
  modified_base 9: mod_base = OTHER; note = 2'-deoxy-2'-fluorouridine-3'-phosphate
  modified_base 10: mod_base = OTHER; note = 2'-deoxy-2'-fluoroguanosine-3'-phosphate
  modified_base 11: mod_base = OTHER; note = 2'-deoxy-2'-fluorouridine-3'-phosphate
  modified_base 12: mod_base = OTHER; note = 2'-O-methyluridine-3'-phosphate
  modified_base 13: mod_base = OTHER; note = 2'-O-methyladenosine-3'-phosphate
  modified_base 14: mod_base = OTHER; note = 2'-O-methylcytidine-3'-phosphate
  modified_base 15: mod_base = OTHER; note = 2'-O-methylcytidine-3'-phosphate
  modified_base 16: mod_base = OTHER; note = 2'-O-methyladenosine-3'-phosphate
  modified_base 17: mod_base = OTHER; note = 2'-O-methyladenosine-3'-phosphate
  modified_base 18: mod_base = OTHER; note = 2'-O-methyladenosine-3'-phosphate
  modified_base 19: mod_base = OTHER; note = 2'-O-methylcytidine-3'-phosphate
  modified_base 20: mod_base = OTHER; note = 2'-O-methyladenosine-3'-phosphate
  modified_base 21: mod_base = OTHER; note = 2'-O-methyladenosine
taaaatattgttaccaaacaa

SEQ ID NO: 4474 - RNA, 21 nt, synthetic construct
  source 1..21: mol_type = other RNA
  modified_base 1: mod_base = OTHER; note = 2'-O-methyladenosine-3'-phosphate
  modified_base 2: mod_base = OTHER; note = 2'-O-methyladenosine-3'-phosphate
  modified_base 3: mod_base = OTHER; note = 2'-O-methyladenosine-3'-phosphate
  modified_base 4: mod_base = OTHER; note = 2'-O-methyladenosine-3'-phosphate
  modified_base 5: mod_base = OTHER; note = 2'-O-methyluridine-3'-phosphate
  modified_base 6: mod_base = OTHER; note = 2'-O-methyladenosine-3'-phosphate
  modified_base 7: mod_base = OTHER; note = 2'-deoxy-2'-fluorouridine-3'-phosphate
  modified_base 8: mod_base = OTHER; note = 2'-O-methyluridine-3'-phosphate
  modified_base 9: mod_base = OTHER; note = 2'-deoxy-2'-fluoroguanosine-3'-phosphate
  modified_base 10: mod_base = OTHER; note = 2'-deoxy-2'-fluorouridine-3'-phosphate
  modified_base 11: mod_base = OTHER; note = 2'-deoxy-2'-fluorouridine-3'-phosphate
  modified_base 12: mod_base = OTHER; note = 2'-O-methyladenosine-3'-phosphate
  modified_base 13: mod_base = OTHER; note = 2'-O-methylcytidine-3'-phosphate
  modified_base 14: mod_base = OTHER; note = 2'-O-methylcytidine-3'-phosphate
  modified_base 15: mod_base = OTHER; note = 2'-O-methyladenosine-3'-phosphate
  modified_base 16: mod_base = OTHER; note = 2'-O-methyladenosine-3'-phosphate
  modified_base 17: mod_base = OTHER; note = 2'-O-methyladenosine-3'-phosphate
  modified_base 18: mod_base = OTHER; note = 2'-O-methylcytidine-3'-phosphate
  modified_base 19: mod_base = OTHER; note = 2'-O-methyladenosine-3'-phosphate
  modified_base 20: mod_base = OTHER; note = 2'-O-methyladenosine-3'-phosphate
  modified_base 21: mod_base = OTHER; note = 2'-O-methyladenosine
aaaatattgttaccaaacaaa

SEQ ID NO: 4475 - RNA, 21 nt, synthetic construct
  source 1..21: mol_type = other RNA
  modified_base 1: mod_base = OTHER; note = 2'-O-methyladenosine-3'-phosphate
  modified_base 2: mod_base = OTHER; note = 2'-O-methyladenosine-3'-phosphate
  modified_base 3: mod_base = OTHER; note = 2'-O-methyladenosine-3'-phosphate
  modified_base 4: mod_base = OTHER; note = 2'-O-methyluridine-3'-phosphate
  modified_base 5: mod_base = OTHER; note = 2'-O-methyladenosine-3'-phosphate
  modified_base 6: mod_base = OTHER; note = 2'-O-methyluridine-3'-phosphate
  modified_base 7: mod_base = OTHER; note = 2'-deoxy-2'-fluorouridine-3'-phosphate
  modified_base 8: mod_base = OTHER; note = 2'-O-methylguanosine-3'-phosphate
  modified_base 9: mod_base = OTHER; note = 2'-deoxy-2'-fluorouridine-3'-phosphate
  modified_base 10: mod_base = OTHER; note = 2'-deoxy-2'-fluorouridine-3'-phosphate
  modified_base 11: mod_base = OTHER; note = 2'-deoxy-2'-fluoroadenosine-3'-phosphate
  modified_base 12: mod_base = OTHER; note = 2'-O-methylcytidine-3'-phosphate
  modified_base 13: mod_base = OTHER; note = 2'-O-methylcytidine-3'-phosphate
  modified_base 14: mod_base = OTHER; note = 2'-O-methyladenosine-3'-phosphate
  modified_base 15: mod_base = OTHER; note = 2'-O-methyladenosine-3'-phosphate
  modified_base 16: mod_base = OTHER; note = 2'-O-methyladenosine-3'-phosphate
  modified_base 17: mod_base = OTHER; note = 2'-O-methylcytidine-3'-phosphate
  modified_base 18: mod_base = OTHER; note = 2'-O-methyladenosine-3'-phosphate
  modified_base 19: mod_base = OTHER; note = 2'-O-methyladenosine-3'-phosphate
  modified_base 20: mod_base = OTHER; note = 2'-O-methyladenosine-3'-phosphate
  modified_base 21: mod_base = OTHER; note = 2'-O-methyladenosine
aaatattgttaccaaacaaaa

SEQ ID NO: 4476 - RNA, 21 nt, synthetic construct
  source 1..21: mol_type = other RNA
  modified_base 1: mod_base = OTHER; note = 2'-O-methyladenosine-3'-phosphate
  modified_base 2: mod_base = OTHER; note = 2'-O-methyladenosine-3'-phosphate
  modified_base 3: mod_base = OTHER; note = 2'-O-methyluridine-3'-phosphate
  modified_base 4: mod_base = OTHER; note = 2'-O-methyladenosine-3'-phosphate
  modified_base 5: mod_base = OTHER; note = 2'-O-methyluridine-3'-phosphate
  modified_base 6: mod_base = OTHER; note = 2'-O-methyluridine-3'-phosphate
  modified_base 7: mod_base = OTHER; note = 2'-deoxy-2'-fluoroguanosine-3'-phosphate
  modified_base 8: mod_base = OTHER; note = 2'-O-methyluridine-3'-phosphate
  modified_base 9: mod_base = OTHER; note = 2'-deoxy-2'-fluorouridine-3'-phosphate
  modified_base 10: mod_base = OTHER; note = 2'-deoxy-2'-fluoroadenosine-3'-phosphate
  modified_base 11: mod_base = OTHER; note = 2'-deoxy-2'-fluorocytidine-3'-phosphate
  modified_base 12: mod_base = OTHER; note = 2'-O-methylcytidine-3'-phosphate
  modified_base 13: mod_base = OTHER; note = 2'-O-methyladenosine-3'-phosphate
  modified_base 14: mod_base = OTHER; note = 2'-O-methyladenosine-3'-phosphate
  modified_base 15: mod_base = OTHER; note = 2'-O-methyladenosine-3'-phosphate
  modified_base 16: mod_base = OTHER; note = 2'-O-methylcytidine-3'-phosphate
  modified_base 17: mod_base = OTHER; note = 2'-O-methyladenosine-3'-phosphate
  modified_base 18: mod_base = OTHER; note = 2'-O-methyladenosine-3'-phosphate
  modified_base 19: mod_base = OTHER; note = 2'-O-methyladenosine-3'-phosphate
  modified_base 20: mod_base = OTHER; note = 2'-O-methyladenosine-3'-phosphate
  modified_base 21: mod_base = OTHER; note = 2'-O-methyladenosine
aatattgttaccaaacaaaaa

SEQ ID NO: 4477 - RNA, 21 nt, synthetic construct
  source 1..21: mol_type = other RNA
  modified_base 1: mod_base = OTHER; note = 2'-O-methyladenosine-3'-phosphate
  modified_base 2: mod_base = OTHER; note = 2'-O-methyluridine-3'-phosphate
  modified_base 3: mod_base = OTHER; note = 2'-O-methyladenosine-3'-phosphate
  modified_base 4: mod_base = OTHER; note = 2'-O-methyluridine-3'-phosphate
  modified_base 5: mod_base = OTHER; note = 2'-O-methyluridine-3'-phosphate
  modified_base 6: mod_base = OTHER; note = 2'-O-methylguanosine-3'-phosphate
  modified_base 7: mod_base = OTHER; note = 2'-deoxy-2'-fluorouridine-3'-phosphate
  modified_base 8: mod_base = OTHER; note = 2'-O-methyluridine-3'-phosphate
  modified_base 9: mod_base = OTHER; note = 2'-deoxy-2'-fluoroadenosine-3'-phosphate
  modified_base 10: mod_base = OTHER; note = 2'-deoxy-2'-fluorocytidine-3'-phosphate
  modified_base 11: mod_base = OTHER; note = 2'-deoxy-2'-fluorocytidine-3'-phosphate
  modified_base 12: mod_base = OTHER; note = 2'-O-methyladenosine-3'-phosphate
  modified_base 13: mod_base = OTHER; note = 2'-O-methyladenosine-3'-phosphate
  modified_base 14: mod_base = OTHER; note = 2'-O-methyladenosine-3'-phosphate
  modified_base 15: mod_base = OTHER; note = 2'-O-methylcytidine-3'-phosphate
  modified_base 16: mod_base = OTHER; note = 2'-O-methyladenosine-3'-phosphate
  modified_base 17: mod_base = OTHER; note = 2'-O-methyladenosine-3'-phosphate
  modified_base 18: mod_base = OTHER; note = 2'-O-methyladenosine-3'-phosphate
  modified_base 19: mod_base = OTHER; note = 2'-O-methyladenosine-3'-phosphate
  modified_base 20: mod_base = OTHER; note = 2'-O-methyladenosine-3'-phosphate
  modified_base 21: mod_base = OTHER; note = 2'-O-methyladenosine
atattgttaccaaacaaaaaa

SEQ ID NO: 4478 - RNA, 21 nt, synthetic construct
  source 1..21: mol_type = other RNA
  modified_base 1: mod_base = OTHER; note = 2'-O-methyluridine-3'-phosphate
  modified_base 2: mod_base = OTHER; note = 2'-O-methyladenosine-3'-phosphate
  modified_base 3: mod_base = OTHER; note = 2'-O-methyluridine-3'-phosphate
  modified_base 4: mod_base = OTHER; note = 2'-O-methyluridine-3'-phosphate
  modified_base 5: mod_base = OTHER; note = 2'-O-methylguanosine-3'-phosphate
  modified_base 6: mod_base = OTHER; note = 2'-O-methyluridine-3'-phosphate
  modified_base 7: mod_base = OTHER; note = 2'-deoxy-2'-fluorouridine-3'-phosphate
  modified_base 8: mod_base = OTHER; note = 2'-O-methyladenosine-3'-phosphate
  modified_base 9: mod_base = OTHER; note = 2'-deoxy-2'-fluorocytidine-3'-phosphate
  modified_base 10: mod_base = OTHER; note = 2'-deoxy-2'-fluorocytidine-3'-phosphate
  modified_base 11: mod_base = OTHER; note = 2'-deoxy-2'-fluoroadenosine-3'-phosphate
  modified_base 12: mod_base = OTHER; note = 2'-O-methyladenosine-3'-phosphate
  modified_base 13: mod_base = OTHER; note = 2'-O-methyladenosine-3'-phosphate
  modified_base 14: mod_base = OTHER; note = 2'-O-methylcytidine-3'-phosphate
  modified_base 15: mod_base = OTHER; note = 2'-O-methyladenosine-3'-phosphate
  modified_base 16: mod_base = OTHER; note = 2'-O-methyladenosine-3'-phosphate
  modified_base 17: mod_base = OTHER; note = 2'-O-methyladenosine-3'-phosphate
  modified_base 18: mod_base = OTHER; note = 2'-O-methyladenosine-3'-phosphate
  modified_base 19: mod_base = OTHER; note = 2'-O-methyladenosine-3'-phosphate
  modified_base 20: mod_base = OTHER; note = 2'-O-methyluridine-3'-phosphate
  modified_base 21: mod_base = OTHER; note = 2'-O-methyladenosine
tattgttaccaaacaaaaata

SEQ ID NO: 4479 - RNA, 21 nt, synthetic construct
  source 1..21: mol_type = other RNA
  modified_base 1: mod_base = OTHER; note = 2'-O-methyladenosine-3'-phosphate
  modified_base 2: mod_base = OTHER; note = 2'-O-methyluridine-3'-phosphate
  modified_base 3: mod_base = OTHER; note = 2'-O-methyluridine-3'-phosphate
  modified_base 4: mod_base = OTHER; note = 2'-O-methylguanosine-3'-phosphate
  modified_base 5: mod_base = OTHER; note = 2'-O-methyluridine-3'-phosphate
  modified_base 6: mod_base = OTHER; note = 2'-O-methyluridine-3'-phosphate
  modified_base 7: mod_base = OTHER; note = 2'-deoxy-2'-fluoroadenosine-3'-phosphate
  modified_base 8: mod_base = OTHER; note = 2'-O-methylcytidine-3'-phosphate
  modified_base 9: mod_base = OTHER; note = 2'-deoxy-2'-fluorocytidine-3'-phosphate
  modified_base 10: mod_base = OTHER; note = 2'-deoxy-2'-fluoroadenosine-3'-phosphate
  modified_base 11: mod_base = OTHER; note = 2'-deoxy-2'-fluoroadenosine-3'-phosphate
  modified_base 12: mod_base = OTHER; note = 2'-O-methyladenosine-3'-phosphate
  modified_base 13: mod_base = OTHER; note = 2'-O-methylcytidine-3'-phosphate
  modified_base 14: mod_base = OTHER; note = 2'-O-methyladenosine-3'-phosphate
  modified_base 15: mod_base = OTHER; note = 2'-O-methyladenosine-3'-phosphate
  modified_base 16: mod_base = OTHER; note = 2'-O-methyladenosine-3'-phosphate
  modified_base 17: mod_base = OTHER; note = 2'-O-methyladenosine-3'-phosphate
  modified_base 18: mod_base = OTHER; note = 2'-O-methyladenosine-3'-phosphate
  modified_base 19: mod_base = OTHER; note = 2'-O-methyluridine-3'-phosphate
  modified_base 20: mod_base = OTHER; note = 2'-O-methyladenosine-3'-phosphate
  modified_base 21: mod_base = OTHER; note = 2'-O-methyladenosine
attgttaccaaacaaaaataa

SEQ ID NO: 4480 - RNA, 21 nt, synthetic construct
  source 1..21: mol_type = other RNA
  modified_base 1: mod_base = OTHER; note = 2'-O-methyluridine-3'-phosphate
  modified_base 2: mod_base = OTHER; note = 2'-O-methyluridine-3'-phosphate
  modified_base 3: mod_base = OTHER; note = 2'-O-methylguanosine-3'-phosphate
  modified_base 4: mod_base = OTHER; note = 2'-O-methyluridine-3'-phosphate
  modified_base 5: mod_base = OTHER; note = 2'-O-methyluridine-3'-phosphate
  modified_base 6: mod_base = OTHER; note = 2'-O-methyladenosine-3'-phosphate
  modified_base 7: mod_base = OTHER; note = 2'-deoxy-2'-fluorocytidine-3'-phosphate
  modified_base 8: mod_base = OTHER; note = 2'-O-methylcytidine-3'-phosphate
  modified_base 9: mod_base = OTHER; note = 2'-deoxy-2'-fluoroadenosine-3'-phosphate
  modified_base 10: mod_base = OTHER; note = 2'-deoxy-2'-fluoroadenosine-3'-phosphate
  modified_base 11: mod_base = OTHER; note = 2'-deoxy-2'-fluoroadenosine-3'-phosphate
  modified_base 12: mod_base = OTHER; note = 2'-O-methylcytidine-3'-phosphate
  modified_base 13: mod_base = OTHER; note = 2'-O-methyladenosine-3'-phosphate
  modified_base 14: mod_base = OTHER; note = 2'-O-methyladenosine-3'-phosphate
  modified_base 15: mod_base = OTHER; note = 2'-O-methyladenosine-3'-phosphate
  modified_base 16: mod_base = OTHER; note = 2'-O-methyladenosine-3'-phosphate
  modified_base 17: mod_base = OTHER; note = 2'-O-methyladenosine-3'-phosphate
  modified_base 18: mod_base = OTHER; note = 2'-O-methyluridine-3'-phosphate
  modified_base 19: mod_base = OTHER; note = 2'-O-methyladenosine-3'-phosphate
  modified_base 20: mod_base = OTHER; note = 2'-O-methyluridine-3'-phosphate
  modified_base 21: mod_base = OTHER; note = 2'-O-methyladenosine
ttgttaccaaacaaaaatata

SEQ ID NO: 4481 - RNA, 21 nt, synthetic construct
  source 1..21: mol_type = other RNA
  modified_base 1: mod_base = OTHER; note = 2'-O-methyluridine-3'-phosphate
  modified_base 2: mod_base = OTHER; note = 2'-O-methylguanosine-3'-phosphate
  modified_base 3: mod_base = OTHER; note = 2'-O-methyluridine-3'-phosphate
  modified_base 4: mod_base = OTHER; note = 2'-O-methyluridine-3'-phosphate
  modified_base 5: mod_base = OTHER; note = 2'-O-methyladenosine-3'-phosphate
  modified_base 6: mod_base = OTHER; note = 2'-O-methylcytidine-3'-phosphate
  modified_base 7: mod_base = OTHER; note = 2'-deoxy-2'-fluorocytidine-3'-phosphate
  modified_base 8: mod_base = OTHER; note = 2'-O-methyladenosine-3'-phosphate
  modified_base 9: mod_base = OTHER; note = 2'-deoxy-2'-fluoroadenosine-3'-phosphate
  modified_base 10: mod_base = OTHER; note = 2'-deoxy-2'-fluoroadenosine-3'-phosphate
  modified_base 11: mod_base = OTHER; note = 2'-deoxy-2'-fluorocytidine-3'-phosphate
  modified_base 12: mod_base = OTHER; note = 2'-O-methyladenosine-3'-phosphate
  modified_base 13: mod_base = OTHER; note = 2'-O-methyladenosine-3'-phosphate
  modified_base 14: mod_base = OTHER; note = 2'-O-methyladenosine-3'-phosphate
  modified_base 15: mod_base = OTHER; note = 2'-O-methyladenosine-3'-phosphate
  modified_base 16: mod_base = OTHER; note = 2'-O-methyladenosine-3'-phosphate
  modified_base 17: mod_base = OTHER; note = 2'-O-methyluridine-3'-phosphate
  modified_base 18: mod_base = OTHER; note = 2'-O-methyladenosine-3'-phosphate
  modified_base 19: mod_base = OTHER; note = 2'-O-methyluridine-3'-phosphate
  modified_base 20: mod_base = OTHER; note = 2'-O-methylcytidine-3'-phosphate
  modified_base 21: mod_base = OTHER; note = 2'-O-methyladenosine
tgttaccaaacaaaaatatca

SEQ ID NO: 4482 - RNA, 21 nt, synthetic construct
  source 1..21: mol_type = other RNA
  modified_base 1: mod_base = OTHER; note = 2'-O-methylguanosine-3'-phosphate
  modified_base 2: mod_base = OTHER; note = 2'-O-methyluridine-3'-phosphate
  modified_base 3: mod_base = OTHER; note = 2'-O-methyluridine-3'-phosphate
  modified_base 4: mod_base = OTHER; note = 2'-O-methyladenosine-3'-phosphate
  modified_base 5: mod_base = OTHER; note = 2'-O-methylcytidine-3'-phosphate
  modified_base 6: mod_base = OTHER; note = 2'-O-methylcytidine-3'-phosphate
  modified_base 7: mod_base = OTHER; note = 2'-deoxy-2'-fluoroadenosine-3'-phosphate
  modified_base 8: mod_base = OTHER; note = 2'-O-methyladenosine-3'-phosphate
  modified_base 9: mod_base = OTHER; note = 2'-deoxy-2'-fluoroadenosine-3'-phosphate
  modified_base 10: mod_base = OTHER; note = 2'-deoxy-2'-fluorocytidine-3'-phosphate
  modified_base 11: mod_base = OTHER; note = 2'-deoxy-2'-fluoroadenosine-3'-phosphate
  modified_base 12: mod_base = OTHER; note = 2'-O-methyladenosine-3'-phosphate
  modified_base 13: mod_base = OTHER; note = 2'-O-methyladenosine-3'-phosphate
  modified_base 14: mod_base = OTHER; note = 2'-O-methyladenosine-3'-phosphate
  modified_base 15: mod_base = OTHER; note = 2'-O-methyladenosine-3'-phosphate
  modified_base 16: mod_base = OTHER; note = 2'-O-methyluridine-3'-phosphate
  modified_base 17: mod_base = OTHER; note = 2'-O-methyladenosine-3'-phosphate
  modified_base 18: mod_base = OTHER; note = 2'-O-methyluridine-3'-phosphate
  modified_base 19: mod_base = OTHER; note = 2'-O-methylcytidine-3'-phosphate
  modified_base 20: mod_base = OTHER; note = 2'-O-methylcytidine-3'-phosphate
  modified_base 21: mod_base = OTHER; note = 2'-O-methyladenosine
gttaccaaacaaaaatatcca

SEQ ID NO: 4483 - RNA, 21 nt, synthetic construct
  source 1..21: mol_type = other RNA
  modified_base 1: mod_base = OTHER; note = 2'-O-methyluridine-3'-phosphate
  modified_base 2: mod_base = OTHER; note = 2'-O-methyluridine-3'-phosphate
  modified_base 3: mod_base = OTHER; note = 2'-O-methyladenosine-3'-phosphate
  modified_base 4: mod_base = OTHER; note = 2'-O-methylcytidine-3'-phosphate
  modified_base 5: mod_base = OTHER; note = 2'-O-methylcytidine-3'-phosphate
  modified_base 6: mod_base = OTHER; note = 2'-O-methyladenosine-3'-phosphate
  modified_base 7: mod_base = OTHER; note = 2'-deoxy-2'-fluoroadenosine-3'-phosphate
  modified_base 8: mod_base = OTHER; note = 2'-O-methyladenosine-3'-phosphate
  modified_base 9: mod_base = OTHER; note = 2'-deoxy-2'-fluorocytidine-3'-phosphate
  modified_base 10: mod_base = OTHER; note = 2'-deoxy-2'-fluoroadenosine-3'-phosphate
  modified_base 11: mod_base = OTHER; note = 2'-deoxy-2'-fluoroadenosine-3'-phosphate
  modified_base 12: mod_base = OTHER; note = 2'-O-methyladenosine-3'-phosphate
  modified_base 13: mod_base = OTHER; note = 2'-O-methyladenosine-3'-phosphate
  modified_base 14: mod_base = OTHER; note = 2'-O-methyladenosine-3'-phosphate
  modified_base 15: mod_base = OTHER; note = 2'-O-methyluridine-3'-phosphate
  modified_base 16: mod_base = OTHER; note = 2'-O-methyladenosine-3'-phosphate
  modified_base 17: mod_base = OTHER; note = 2'-O-methyluridine-3'-phosphate
  modified_base 18: mod_base = OTHER; note = 2'-O-methylcytidine-3'-phosphate
  modified_base 19: mod_base = OTHER; note = 2'-O-methylcytidine-3'-phosphate
  modified_base 20: mod_base = OTHER; note = 2'-O-methyladenosine-3'-phosphate
  modified_base 21: mod_base = OTHER; note = 2'-O-methyladenosine
ttaccaaacaaaaatatccaa

SEQ ID NO: 4484 - RNA, 21 nt, synthetic construct
  source 1..21: mol_type = other RNA
  modified_base 1: mod_base = OTHER; note = 2'-O-methyluridine-3'-phosphate
  modified_base 2: mod_base = OTHER; note = 2'-O-methyladenosine-3'-phosphate
  modified_base 3: mod_base = OTHER; note = 2'-O-methylcytidine-3'-phosphate
  modified_base 4: mod_base = OTHER; note = 2'-O-methylcytidine-3'-phosphate
  modified_base 5: mod_base = OTHER; note = 2'-O-methyladenosine-3'-phosphate
  modified_base 6: mod_base = OTHER; note = 2'-O-methyladenosine-3'-phosphate
  modified_base 7: mod_base = OTHER; note = 2'-deoxy-2'-fluoroadenosine-3'-phosphate
  modified_base 8: mod_base = OTHER; note = 2'-O-methylcytidine-3'-phosphate
  modified_base 9: mod_base = OTHER; note = 2'-deoxy-2'-fluoroadenosine-3'-phosphate
  modified_base 10: mod_base = OTHER; note = 2'-deoxy-2'-fluoroadenosine-3'-phosphate
  modified_base 11: mod_base = OTHER; note = 2'-deoxy-2'-fluoroadenosine-3'-phosphate
  modified_base 12: mod_base = OTHER; note = 2'-O-methyladenosine-3'-phosphate
  modified_base 13: mod_base = OTHER; note = 2'-O-methyladenosine-3'-phosphate
  modified_base 14: mod_base = OTHER; note = 2'-O-methyluridine-3'-phosphate
  modified_base 15: mod_base = OTHER; note = 2'-O-methyladenosine-3'-phosphate
  modified_base 16: mod_base = OTHER; note = 2'-O-methyluridine-3'-phosphate
  modified_base 17: mod_base = OTHER; note = 2'-O-methylcytidine-3'-phosphate
  modified_base 18: mod_base = OTHER; note = 2'-O-methylcytidine-3'-phosphate
  modified_base 19: mod_base = OTHER; note = 2'-O-methyladenosine-3'-phosphate
  modified_base 20: mod_base = OTHER; note = 2'-O-methyluridine-3'-phosphate
  modified_base 21: mod_base = OTHER; note = 2'-O-methyladenosine
taccaaacaaaaatatccata

SEQ ID NO: 4485 - RNA, 21 nt, synthetic construct
  source 1..21: mol_type = other RNA
  modified_base 1: mod_base = OTHER; note = 2'-O-methylcytidine-3'-phosphate
  modified_base 2: mod_base = OTHER; note = 2'-O-methylcytidine-3'-phosphate
  modified_base 3: mod_base = OTHER; note = 2'-O-methyladenosine-3'-phosphate
  modified_base 4: mod_base = OTHER; note = 2'-O-methyladenosine-3'-phosphate
  modified_base 5: mod_base = OTHER; note = 2'-O-methyladenosine-3'-phosphate
  modified_base 6: mod_base = OTHER; note = 2'-O-methylcytidine-3'-phosphate
  modified_base 7: mod_base = OTHER; note = 2'-deoxy-2'-fluoroadenosine-3'-phosphate
  modified_base 8: mod_base = OTHER; note = 2'-O-methyladenosine-3'-phosphate
  modified_base 9: mod_base = OTHER; note = 2'-deoxy-2'-fluoroadenosine-3'-phosphate
  modified_base 10: mod_base = OTHER; note = 2'-deoxy-2'-fluoroadenosine-3'-phosphate
  modified_base 11: mod_base = OTHER; note = 2'-deoxy-2'-fluoroadenosine-3'-phosphate
  modified_base 12: mod_base = OTHER; note = 2'-O-methyluridine-3'-phosphate
  modified_base 13: mod_base = OTHER; note = 2'-O-methyladenosine-3'-phosphate
  modified_base 14: mod_base = OTHER; note = 2'-O-methyluridine-3'-phosphate
  modified_base 15: mod_base = OTHER; note = 2'-O-methylcytidine-3'-phosphate
  modified_base 16: mod_base = OTHER; note = 2'-O-methylcytidine-3'-phosphate
  modified_base 17: mod_base = OTHER; note = 2'-O-methyladenosine-3'-phosphate
  modified_base 18: mod_base = OTHER; note = 2'-O-methyluridine-3'-phosphate
  modified_base 19: mod_base = OTHER; note = 2'-O-methyluridine-3'-phosphate
  modified_base 20: mod_base = OTHER; note = 2'-O-methylcytidine-3'-phosphate
  modified_base 21: mod_base = OTHER; note = 2'-O-methyladenosine
ccaaacaaaaatatccattca

SEQ ID NO: 4486 - RNA, 21 nt, synthetic construct
  source 1..21: mol_type = other RNA
  modified_base 1: mod_base = OTHER; note = 2'-O-methylcytidine-3'-phosphate
  modified_base 2: mod_base = OTHER; note = 2'-O-methyladenosine-3'-phosphate
  modified_base 3: mod_base = OTHER; note = 2'-O-methyladenosine-3'-phosphate
  modified_base 4: mod_base = OTHER; note = 2'-O-methyladenosine-3'-phosphate
  modified_base 5: mod_base = OTHER; note = 2'-O-methylcytidine-3'-phosphate
  modified_base 6: mod_base = OTHER; note = 2'-O-methyladenosine-3'-phosphate
  modified_base 7: mod_base = OTHER; note = 2'-deoxy-2'-fluoroadenosine-3'-phosphate
  modified_base 8: mod_base = OTHER; note = 2'-O-methyladenosine-3'-phosphate
  modified_base 9: mod_base = OTHER; note = 2'-deoxy-2'-fluoroadenosine-3'-phosphate
  modified_base 10: mod_base = OTHER; note = 2'-deoxy-2'-fluoroadenosine-3'-phosphate
  modified_base 11: mod_base = OTHER; note = 2'-deoxy-2'-fluorouridine-3'-phosphate
  modified_base 12: mod_base = OTHER; note = 2'-O-methyladenosine-3'-phosphate
  modified_base 13: mod_base = OTHER; note = 2'-O-methyluridine-3'-phosphate
  modified_base 14: mod_base = OTHER; note = 2'-O-methylcytidine-3'-phosphate
  modified_base 15: mod_base = OTHER; note = 2'-O-methylcytidine-3'-phosphate
  modified_base 16: mod_base = OTHER; note = 2'-O-methyladenosine-3'-phosphate
  modified_base 17: mod_base = OTHER; note = 2'-O-methyluridine-3'-phosphate
  modified_base 18: mod_base = OTHER; note = 2'-O-methyluridine-3'-phosphate
  modified_base 19: mod_base = OTHER; note = 2'-O-methylcytidine-3'-phosphate
  modified_base 20: mod_base = OTHER; note = 2'-O-methyladenosine-3'-phosphate
  modified_base 21: mod_base = OTHER; note = 2'-O-methyladenosine
caaacaaaaatatccattcaa

SEQ ID NO: 4487 - RNA, 21 nt, synthetic construct
  source 1..21: mol_type = other RNA
  modified_base 1: mod_base = OTHER; note = 2'-O-methyladenosine-3'-phosphate
  modified_base 2: mod_base = OTHER; note = 2'-O-methyladenosine-3'-phosphate
  modified_base 3: mod_base = OTHER; note = 2'-O-methyladenosine-3'-phosphate
  modified_base 4: mod_base = OTHER; note = 2'-O-methylcytidine-3'-phosphate
  modified_base 5: mod_base = OTHER; note = 2'-O-methyladenosine-3'-phosphate
  modified_base 6: mod_base = OTHER; note = 2'-O-methyladenosine-3'-phosphate
  modified_base 7: mod_base = OTHER; note = 2'-deoxy-2'-fluoroadenosine-3'-phosphate
  modified_base 8: mod_base = OTHER; note = 2'-O-methyladenosine-3'-phosphate
  modified_base 9: mod_base = OTHER; note = 2'-deoxy-2'-fluoroadenosine-3'-phosphate
  modified_base 10: mod_base = OTHER; note = 2'-deoxy-2'-fluorouridine-3'-phosphate
  modified_base 11: mod_base = OTHER; note = 2'-deoxy-2'-fluoroadenosine-3'-phosphate
  modified_base 12: mod_base = OTHER; note = 2'-O-methyluridine-3'-phosphate
  modified_base 13: mod_base = OTHER; note = 2'-O-methylcytidine-3'-phosphate
  modified_base 14: mod_base = OTHER; note = 2'-O-methylcytidine-3'-phosphate
  modified_base 15: mod_base = OTHER; note = 2'-O-methyladenosine-3'-phosphate
  modified_base 16: mod_base = OTHER; note = 2'-O-methyluridine-3'-phosphate
  modified_base 17: mod_base = OTHER; note = 2'-O-methyluridine-3'-phosphate
  modified_base 18: mod_base = OTHER; note = 2'-O-methylcytidine-3'-phosphate
  modified_base 19: mod_base = OTHER; note = 2'-O-methyladenosine-3'-phosphate
  modified_base 20: mod_base = OTHER; note = 2'-O-methyladenosine-3'-phosphate
  modified_base 21: mod_base = OTHER; note = 2'-O-methyladenosine
aaacaaaaatatccattcaaa

SEQ ID NO: 4488 - RNA, 21 nt, synthetic construct
  source 1..21: mol_type = other RNA
  modified_base 1: mod_base = OTHER; note = 2'-O-methyladenosine-3'-phosphate
  modified_base 2: mod_base = OTHER; note = 2'-O-methyladenosine-3'-phosphate
  modified_base 3: mod_base = OTHER; note = 2'-O-methyladenosine-3'-phosphate
  modified_base 4: mod_base = OTHER; note = 2'-O-methyladenosine-3'-phosphate
  modified_base 5: mod_base = OTHER; note = 2'-O-methyluridine-3'-phosphate
  modified_base 6: mod_base = OTHER; note = 2'-O-methyladenosine-3'-phosphate
  modified_base 7: mod_base = OTHER; note = 2'-deoxy-2'-fluorouridine-3'-phosphate
  modified_base 8: mod_base = OTHER; note = 2'-O-methylcytidine-3'-phosphate
  modified_base 9: mod_base = OTHER; note = 2'-deoxy-2'-fluorocytidine-3'-phosphate
  modified_base 10: mod_base = OTHER; note = 2'-deoxy-2'-fluoroadenosine-3'-phosphate
  modified_base 11: mod_base = OTHER; note = 2'-deoxy-2'-fluorouridine-3'-phosphate
  modified_base 12: mod_base = OTHER; note = 2'-O-methyluridine-3'-phosphate
  modified_base 13: mod_base = OTHER; note = 2'-O-methylcytidine-3'-phosphate
  modified_base 14: mod_base = OTHER; note = 2'-O-methyladenosine-3'-phosphate
  modified_base 15: mod_base = OTHER; note = 2'-O-methyladenosine-3'-phosphate
  modified_base 16: mod_base = OTHER; note = 2'-O-methyladenosine-3'-phosphate
  modified_base 17: mod_base = OTHER; note = 2'-O-methyladenosine-3'-phosphate
  modified_base 18: mod_base = OTHER; note = 2'-O-methyluridine-3'-phosphate
  modified_base 19: mod_base = OTHER; note = 2'-O-methyladenosine-3'-phosphate
  modified_base 20: mod_base = OTHER; note = 2'-O-methylcytidine-3'-phosphate
  modified_base 21: mod_base = OTHER; note = 2'-O-methyladenosine
aaaatatccattcaaaataca

SEQ ID NO: 4489 - RNA, 21 nt, synthetic construct
  source 1..21: mol_type = other RNA
  modified_base 1: mod_base = OTHER; note = 2'-O-methyladenosine-3'-phosphate
  modified_base 2: mod_base = OTHER; note = 2'-O-methyladenosine-3'-phosphate
  modified_base 3: mod_base = OTHER; note = 2'-O-methyladenosine-3'-phosphate
  modified_base 4: mod_base = OTHER; note = 2'-O-methyluridine-3'-phosphate
  modified_base 5: mod_base = OTHER; note = 2'-O-methyladenosine-3'-phosphate
  modified_base 6: mod_base = OTHER; note = 2'-O-methyluridine-3'-phosphate
  modified_base 7: mod_base = OTHER; note = 2'-deoxy-2'-fluorocytidine-3'-phosphate
  modified_base 8: mod_base = OTHER; note = 2'-O-methylcytidine-3'-phosphate
  modified_base 9: mod_base = OTHER; note = 2'-deoxy-2'-fluoroadenosine-3'-phosphate
  modified_base 10: mod_base = OTHER; note = 2'-deoxy-2'-fluorouridine-3'-phosphate
  modified_base 11: mod_base = OTHER; note = 2'-deoxy-2'-fluorouridine-3'-phosphate
  modified_base 12: mod_base = OTHER; note = 2'-O-methylcytidine-3'-phosphate
  modified_base 13: mod_base = OTHER; note = 2'-O-methyladenosine-3'-phosphate
  modified_base 14: mod_base = OTHER; note = 2'-O-methyladenosine-3'-phosphate
  modified_base 15: mod_base = OTHER; note = 2'-O-methyladenosine-3'-phosphate
  modified_base 16: mod_base = OTHER; note = 2'-O-methyladenosine-3'-phosphate
  modified_base 17: mod_base = OTHER; note = 2'-O-methyluridine-3'-phosphate
  modified_base 18: mod_base = OTHER; note = 2'-O-methyladenosine-3'-phosphate
  modified_base 19: mod_base = OTHER; note = 2'-O-methylcytidine-3'-phosphate
  modified_base 20: mod_base = OTHER; note = 2'-O-methyladenosine-3'-phosphate
  modified_base 21: mod_base = OTHER; note = 2'-O-methyladenosine
aaatatccattcaaaatacaa

SEQ ID NO: 4490 - RNA, 21 nt, synthetic construct
  source 1..21: mol_type = other RNA
  modified_base 1: mod_base = OTHER; note = 2'-O-methyladenosine-3'-phosphate
  modified_base 2: mod_base = OTHER; note = 2'-O-methyladenosine-3'-phosphate
  modified_base 3: mod_base = OTHER; note = 2'-O-methyluridine-3'-phosphate
  modified_base 4: mod_base = OTHER; note = 2'-O-methyladenosine-3'-phosphate
  modified_base 5: mod_base = OTHER; note = 2'-O-methyluridine-3'-phosphate
  modified_base 6: mod_base = OTHER; note = 2'-O-methylcytidine-3'-phosphate
  modified_base 7: mod_base = OTHER; note = 2'-deoxy-2'-fluorocytidine-3'-phosphate
  modified_base 8: mod_base = OTHER; note = 2'-O-methyladenosine-3'-phosphate
  modified_base 9: mod_base = OTHER; note = 2'-deoxy-2'-fluorouridine-3'-phosphate
  modified_base 10: mod_base = OTHER; note = 2'-deoxy-2'-fluorouridine-3'-phosphate
  modified_base 11: mod_base = OTHER; note = 2'-deoxy-2'-fluorocytidine-3'-phosphate
  modified_base 12: mod_base = OTHER; note = 2'-O-methyladenosine-3'-phosphate
  modified_base 13: mod_base = OTHER; note = 2'-O-methyladenosine-3'-phosphate
  modified_base 14: mod_base = OTHER; note = 2'-O-methyladenosine-3'-phosphate
  modified_base 15: mod_base = OTHER; note = 2'-O-methyladenosine-3'-phosphate
  modified_base 16: mod_base = OTHER; note = 2'-O-methyluridine-3'-phosphate
  modified_base 17: mod_base = OTHER; note = 2'-O-methyladenosine-3'-phosphate
  modified_base 18: mod_base = OTHER; note = 2'-O-methylcytidine-3'-phosphate
  modified_base 19: mod_base = OTHER; note = 2'-O-methyladenosine-3'-phosphate
  modified_base 20: mod_base = OTHER; note = 2'-O-methyladenosine-3'-phosphate
  modified_base 21: mod_base = OTHER; note = 2'-O-methyladenosine
aatatccattcaaaatacaaa

SEQ ID NO: 4491 - RNA, 21 nt, synthetic construct
  source 1..21: mol_type = other RNA
  modified_base 1: mod_base = OTHER; note = 2'-O-methyladenosine-3'-phosphate
  modified_base 2: mod_base = OTHER; note = 2'-O-methyluridine-3'-phosphate
  modified_base 3: mod_base = OTHER; note = 2'-O-methyladenosine-3'-phosphate
  modified_base 4: mod_base = OTHER; note = 2'-O-methyluridine-3'-phosphate
  modified_base 5: mod_base = OTHER; note = 2'-O-methylcytidine-3'-phosphate
  modified_base 6: mod_base = OTHER; note = 2'-O-methylcytidine-3'-phosphate
  modified_base 7: mod_base = OTHER; note = 2'-deoxy-2'-fluoroadenosine-3'-phosphate
  modified_base 8: mod_base = OTHER; note = 2'-O-methyluridine-3'-phosphate
  modified_base 9: mod_base = OTHER; note = 2'-deoxy-2'-fluorouridine-3'-phosphate
  modified_base 10: mod_base = OTHER; note = 2'-deoxy-2'-fluorocytidine-3'-phosphate
  modified_base 11: mod_base = OTHER; note = 2'-deoxy-2'-fluoroadenosine-3'-phosphate
  modified_base 12: mod_base = OTHER; note = 2'-O-methyladenosine-3'-phosphate
  modified_base 13: mod_base = OTHER; note = 2'-O-methyladenosine-3'-phosphate
  modified_base 14: mod_base = OTHER; note = 2'-O-methyladenosine-3'-phosphate
  modified_base 15: mod_base = OTHER; note = 2'-O-methyluridine-3'-phosphate
  modified_base 16: mod_base = OTHER; note = 2'-O-methyladenosine-3'-phosphate
  modified_base 17: mod_base = OTHER; note = 2'-O-methylcytidine-3'-phosphate
  modified_base 18: mod_base = OTHER; note = 2'-O-methyladenosine-3'-phosphate
  modified_base 19: mod_base = OTHER; note = 2'-O-methyladenosine-3'-phosphate
  modified_base 20: mod_base = OTHER; note = 2'-O-methyluridine-3'-phosphate
  modified_base 21: mod_base = OTHER; note = 2'-O-methyladenosine
atatccattcaaaatacaata

SEQ ID NO: 4492 - RNA, 21 nt, synthetic construct
  source 1..21: mol_type = other RNA
  modified_base 1: mod_base = OTHER; note = 2'-O-methyluridine-3'-phosphate
  modified_base 2: mod_base = OTHER; note = 2'-O-methyladenosine-3'-phosphate
  modified_base 3: mod_base = OTHER; note = 2'-O-methyluridine-3'-phosphate
  modified_base 4: mod_base = OTHER; note = 2'-O-methylcytidine-3'-phosphate
  modified_base 5: mod_base = OTHER; note = 2'-O-methylcytidine-3'-phosphate
  modified_base 6: mod_base = OTHER; note = 2'-O-methyladenosine-3'-phosphate
  modified_base 7: mod_base = OTHER; note = 2'-deoxy-2'-fluorouridine-3'-phosphate
  modified_base 8: mod_base = OTHER; note = 2'-O-methyluridine-3'-phosphate
  modified_base 9: mod_base = OTHER; note = 2'-deoxy-2'-fluorocytidine-3'-phosphate
  modified_base 10: mod_base = OTHER; note = 2'-deoxy-2'-fluoroadenosine-3'-phosphate
  modified_base 11: mod_base = OTHER; note = 2'-deoxy-2'-fluoroadenosine-3'-phosphate
  modified_base 12: mod_base = OTHER; note = 2'-O-methyladenosine-3'-phosphate
  modified_base 13: mod_base = OTHER; note = 2'-O-methyladenosine-3'-phosphate
  modified_base 14: mod_base = OTHER; note = 2'-O-methyluridine-3'-phosphate
  modified_base 15: mod_base = OTHER; note = 2'-O-methyladenosine-3'-phosphate
  modified_base 16: mod_base = OTHER; note = 2'-O-methylcytidine-3'-phosphate
  modified_base 17: mod_base = OTHER; note = 2'-O-methyladenosine-3'-phosphate
  modified_base 18: mod_base = OTHER; note = 2'-O-methyladenosine-3'-phosphate
  modified_base 19: mod_base = OTHER; note = 2'-O-methyluridine-3'-phosphate
  modified_base 20: mod_base = OTHER; note = 2'-O-methyluridine-3'-phosphate
  modified_base 21: mod_base = OTHER; note = 2'-O-methyladenosine
tatccattcaaaatacaatta

SEQ ID NO: 4493 - RNA, 21 nt, synthetic construct
  source 1..21: mol_type = other RNA
  modified_base 1: mod_base = OTHER; note = 2'-O-methyladenosine-3'-phosphate
  modified_base 2: mod_base = OTHER; note = 2'-O-methyluridine-3'-phosphate
  modified_base 3: mod_base = OTHER; note = 2'-O-methylcytidine-3'-phosphate
  modified_base 4: mod_base = OTHER; note = 2'-O-methylcytidine-3'-phosphate
  modified_base 5: mod_base = OTHER; note = 2'-O-methyladenosine-3'-phosphate
  modified_base 6: mod_base = OTHER; note = 2'-O-methyluridine-3'-phosphate
  modified_base 7: mod_base = OTHER; note = 2'-deoxy-2'-fluorouridine-3'-phosphate
  modified_base 8: mod_base = OTHER; note = 2'-O-methylcytidine-3'-phosphate
  modified_base 9: mod_base = OTHER; note = 2'-deoxy-2'-fluoroadenosine-3'-phosphate
  modified_base 10: mod_base = OTHER; note = 2'-deoxy-2'-fluoroadenosine-3'-phosphate
  modified_base 11: mod_base = OTHER; note = 2'-deoxy-2'-fluoroadenosine-3'-phosphate
  modified_base 12: mod_base = OTHER; note = 2'-O-methyladenosine-3'-phosphate
  modified_base 13: mod_base = OTHER; note = 2'-O-methyluridine-3'-phosphate
  modified_base 14: mod_base = OTHER; note = 2'-O-methyladenosine-3'-phosphate
  modified_base 15: mod_base = OTHER; note = 2'-O-methylcytidine-3'-phosphate
  modified_base 16: mod_base = OTHER; note = 2'-O-methyladenosine-3'-phosphate
  modified_base 17: mod_base = OTHER; note = 2'-O-methyladenosine-3'-phosphate
  modified_base 18: mod_base = OTHER; note = 2'-O-methyluridine-3'-phosphate
  modified_base 19: mod_base = OTHER; note = 2'-O-methyluridine-3'-phosphate
  modified_base 20: mod_base = OTHER; note = 2'-O-methyluridine-3'-phosphate
  modified_base 21: mod_base = OTHER; note = 2'-O-methyladenosine
atccattcaaaatacaattta

SEQ ID NO: 4494 - RNA, 21 nt, synthetic construct
  source 1..21: mol_type = other RNA
  modified_base 1: mod_base = OTHER; note = 2'-O-methyluridine-3'-phosphate
  modified_base 2: mod_base = OTHER; note = 2'-O-methylcytidine-3'-phosphate
  modified_base 3: mod_base = OTHER; note = 2'-O-methylcytidine-3'-phosphate
  modified_base 4: mod_base = OTHER; note = 2'-O-methyladenosine-3'-phosphate
  modified_base 5: mod_base = OTHER; note = 2'-O-methyluridine-3'-phosphate
  modified_base 6: mod_base = OTHER; note = 2'-O-methyluridine-3'-phosphate
  modified_base 7: mod_base = OTHER; note = 2'-deoxy-2'-fluorocytidine-3'-phosphate
  modified_base 8: mod_base = OTHER; note = 2'-O-methyladenosine-3'-phosphate
  modified_base 9: mod_base = OTHER; note = 2'-deoxy-2'-fluoroadenosine-3'-phosphate
  modified_base 10: mod_base = OTHER; note = 2'-deoxy-2'-fluoroadenosine-3'-phosphate
  modified_base 11: mod_base = OTHER; note = 2'-deoxy-2'-fluoroadenosine-3'-phosphate
  modified_base 12: mod_base = OTHER; note = 2'-O-methyluridine-3'-phosphate
  modified_base 13: mod_base = OTHER; note = 2'-O-methyladenosine-3'-phosphate
  modified_base 14: mod_base = OTHER; note = 2'-O-methylcytidine-3'-phosphate
  modified_base 15: mod_base = OTHER; note = 2'-O-methyladenosine-3'-phosphate
  modified_base 16: mod_base = OTHER; note = 2'-O-methyladenosine-3'-phosphate
  modified_base 17: mod_base = OTHER; note = 2'-O-methyluridine-3'-phosphate
  modified_base 18: mod_base = OTHER; note = 2'-O-methyluridine-3'-phosphate
  modified_base 19: mod_base = OTHER; note = 2'-O-methyluridine-3'-phosphate
  modified_base 20: mod_base = OTHER; note = 2'-O-methyladenosine-3'-phosphate
  modified_base 21: mod_base = OTHER; note = 2'-O-methyladenosine
tccattcaaaatacaatttaa

SEQ ID NO: 4495 - RNA, 21 nt, synthetic construct
  source 1..21: mol_type = other RNA
  modified_base 1: mod_base = OTHER; note = 2'-O-methylcytidine-3'-phosphate
  modified_base 2: mod_base = OTHER; note = 2'-O-methylcytidine-3'-phosphate
  modified_base 3: mod_base = OTHER; note = 2'-O-methyladenosine-3'-phosphate
  modified_base 4: mod_base = OTHER; note = 2'-O-methyluridine-3'-phosphate
  modified_base 5: mod_base = OTHER; note = 2'-O-methyluridine-3'-phosphate
  modified_base 6: mod_base = OTHER; note = 2'-O-methylcytidine-3'-phosphate
  modified_base 7: mod_base = OTHER; note = 2'-deoxy-2'-fluoroadenosine-3'-phosphate
  modified_base 8: mod_base = OTHER; note = 2'-O-methyladenosine-3'-phosphate
  modified_base 9: mod_base = OTHER; note = 2'-deoxy-2'-fluoroadenosine-3'-phosphate
  modified_base 10: mod_base = OTHER; note = 2'-deoxy-2'-fluoroadenosine-3'-phosphate
  modified_base 11: mod_base = OTHER; note = 2'-deoxy-2'-fluorouridine-3'-phosphate
  modified_base 12: mod_base = OTHER; note = 2'-O-methyladenosine-3'-phosphate
  modified_base 13: mod_base = OTHER; note = 2'-O-methylcytidine-3'-phosphate
  modified_base 14: mod_base = OTHER; note = 2'-O-methyladenosine-3'-phosphate
  modified_base 15: mod_base = OTHER; note = 2'-O-methyladenosine-3'-phosphate
  modified_base 16: mod_base = OTHER; note = 2'-O-methyluridine-3'-phosphate
  modified_base 17: mod_base = OTHER; note = 2'-O-methyluridine-3'-phosphate
  modified_base 18: mod_base = OTHER; note = 2'-O-methyluridine-3'-phosphate
  modified_base 19: mod_base = OTHER; note = 2'-O-methyladenosine-3'-phosphate
  modified_base 20: mod_base = OTHER; note = 2'-O-methyladenosine-3'-phosphate
  modified_base 21: mod_base = OTHER; note = 2'-O-methyladenosine
ccattcaaaatacaatttaaa

SEQ ID NO: 4496 - RNA, 21 nt, synthetic construct
  source 1..21: mol_type = other RNA
  modified_base 1: mod_base = OTHER; note = 2'-O-methylcytidine-3'-phosphate
  modified_base 2: mod_base = OTHER; note = 2'-O-methyladenosine-3'-phosphate
  modified_base 3: mod_base = OTHER; note = 2'-O-methyluridine-3'-phosphate
  modified_base 4: mod_base = OTHER; note = 2'-O-methyluridine-3'-phosphate
  modified_base 5: mod_base = OTHER; note = 2'-O-methylcytidine-3'-phosphate
  modified_base 6: mod_base = OTHER; note = 2'-O-methyladenosine-3'-phosphate
  modified_base 7: mod_base = OTHER; note = 2'-deoxy-2'-fluoroadenosine-3'-phosphate
  modified_base 8: mod_base = OTHER; note = 2'-O-methyladenosine-3'-phosphate
  modified_base 9: mod_base = OTHER; note = 2'-deoxy-2'-fluoroadenosine-3'-phosphate
  modified_base 10: mod_base = OTHER; note = 2'-deoxy-2'-fluorouridine-3'-phosphate
  modified_base 11: mod_base = OTHER; note = 2'-deoxy-2'-fluoroadenosine-3'-phosphate
  modified_base 12: mod_base = OTHER; note = 2'-O-methylcytidine-3'-phosphate
  modified_base 13: mod_base = OTHER; note = 2'-O-methyladenosine-3'-phosphate
  modified_base 14: mod_base = OTHER; note = 2'-O-methyladenosine-3'-phosphate
  modified_base 15: mod_base = OTHER; note = 2'-O-methyluridine-3'-phosphate
  modified_base 16: mod_base = OTHER; note = 2'-O-methyluridine-3'-phosphate
  modified_base 17: mod_base = OTHER; note = 2'-O-methyluridine-3'-phosphate
  modified_base 18: mod_base = OTHER; note = 2'-O-methyladenosine-3'-phosphate
  modified_base 19: mod_base = OTHER; note = 2'-O-methyladenosine-3'-phosphate
  modified_base 20: mod_base = OTHER; note = 2'-O-methylcytidine-3'-phosphate
  modified_base 21: mod_base = OTHER; note = 2'-O-methyladenosine
cattcaaaatacaatttaaca

SEQ ID NO: 4497 - RNA, 21 nt, synthetic construct
  source 1..21: mol_type = other RNA
  modified_base 1: mod_base = OTHER; note = 2'-O-methyladenosine-3'-phosphate
  modified_base 2: mod_base = OTHER; note = 2'-O-methyluridine-3'-phosphate
  modified_base 3: mod_base = OTHER; note = 2'-O-methyluridine-3'-phosphate
  modified_base 4: mod_base = OTHER; note = 2'-O-methylcytidine-3'-phosphate
  modified_base 5: mod_base = OTHER; note = 2'-O-methyladenosine-3'-phosphate
  modified_base 6: mod_base = OTHER; note = 2'-O-methyladenosine-3'-phosphate
  modified_base 7: mod_base = OTHER; note = 2'-deoxy-2'-fluoroadenosine-3'-phosphate
  modified_base 8: mod_base = OTHER; note = 2'-O-methyladenosine-3'-phosphate
  modified_base 9: mod_base = OTHER; note = 2'-deoxy-2'-fluorouridine-3'-phosphate
  modified_base 10: mod_base = OTHER; note = 2'-deoxy-2'-fluoroadenosine-3'-phosphate
  modified_base 11: mod_base = OTHER; note = 2'-deoxy-2'-fluorocytidine-3'-phosphate
  modified_base 12: mod_base = OTHER; note = 2'-O-methyladenosine-3'-phosphate
  modified_base 13: mod_base = OTHER; note = 2'-O-methyladenosine-3'-phosphate
  modified_base 14: mod_base = OTHER; note = 2'-O-methyluridine-3'-phosphate
  modified_base 15: mod_base = OTHER; note = 2'-O-methyluridine-3'-phosphate
  modified_base 16: mod_base = OTHER; note = 2'-O-methyluridine-3'-phosphate
  modified_base 17: mod_base = OTHER; note = 2'-O-methyladenosine-3'-phosphate
  modified_base 18: mod_base = OTHER; note = 2'-O-methyladenosine-3'-phosphate
  modified_base 19: mod_base = OTHER; note = 2'-O-methylcytidine-3'-phosphate
  modified_base 20: mod_base = OTHER; note = 2'-O-methyladenosine-3'-phosphate
  modified_base 21: mod_base = OTHER; note = 2'-O-methyladenosine
attcaaaatacaatttaacaa

SEQ ID NO: 4498 - RNA, 21 nt, synthetic construct
  source 1..21: mol_type = other RNA
  modified_base 1: mod_base = OTHER; note = 2'-O-methyluridine-3'-phosphate
  modified_base 2: mod_base = OTHER; note = 2'-O-methyluridine-3'-phosphate
  modified_base 3: mod_base = OTHER; note = 2'-O-methylcytidine-3'-phosphate
  modified_base 4: mod_base = OTHER; note = 2'-O-methyladenosine-3'-phosphate
  modified_base 5: mod_base = OTHER; note = 2'-O-methyladenosine-3'-phosphate
  modified_base 6: mod_base = OTHER; note = 2'-O-methyladenosine-3'-phosphate
  modified_base 7: mod_base = OTHER; note = 2'-deoxy-2'-fluoroadenosine-3'-phosphate
  modified_base 8: mod_base = OTHER; note = 2'-O-methyluridine-3'-phosphate
  modified_base 9: mod_base = OTHER; note = 2'-deoxy-2'-fluoroadenosine-3'-phosphate
  modified_base 10: mod_base = OTHER; note = 2'-deoxy-2'-fluorocytidine-3'-phosphate
  modified_base 11: mod_base = OTHER; note = 2'-deoxy-2'-fluoroadenosine-3'-phosphate
  modified_base 12: mod_base = OTHER; note = 2'-O-methyladenosine-3'-phosphate
  modified_base 13: mod_base = OTHER; note = 2'-O-methyluridine-3'-phosphate
  modified_base 14: mod_base = OTHER; note = 2'-O-methyluridine-3'-phosphate
  modified_base 15: mod_base = OTHER; note = 2'-O-methyluridine-3'-phosphate
  modified_base 16: mod_base = OTHER; note = 2'-O-methyladenosine-3'-phosphate
  modified_base 17: mod_base = OTHER; note = 2'-O-methyladenosine-3'-phosphate
  modified_base 18: mod_base = OTHER; note = 2'-O-methylcytidine-3'-phosphate
  modified_base 19: mod_base = OTHER; note = 2'-O-methyladenosine-3'-phosphate
  modified_base 20: mod_base = OTHER; note = 2'-O-methyladenosine-3'-phosphate
  modified_base 21: mod_base = OTHER; note = 2'-O-methyladenosine
ttcaaaatacaatttaacaaa

SEQ ID NO: 4499 - RNA, 21 nt, synthetic construct
  source 1..21: mol_type = other RNA
  modified_base 1: mod_base = OTHER; note = 2'-O-methyluridine-3'-phosphate
  modified_base 2: mod_base = OTHER; note = 2'-O-methylcytidine-3'-phosphate
  modified_base 3: mod_base = OTHER; note = 2'-O-methyladenosine-3'-phosphate
  modified_base 4: mod_base = OTHER; note = 2'-O-methyladenosine-3'-phosphate
  modified_base 5: mod_base = OTHER; note = 2'-O-methyladenosine-3'-phosphate
  modified_base 6: mod_base = OTHER; note = 2'-O-methyladenosine-3'-phosphate
  modified_base 7: mod_base = OTHER; note = 2'-deoxy-2'-fluorouridine-3'-phosphate
  modified_base 8: mod_base = OTHER; note = 2'-O-methyladenosine-3'-phosphate
  modified_base 9: mod_base = OTHER; note = 2'-deoxy-2'-fluorocytidine-3'-phosphate
  modified_base 10: mod_base = OTHER; note = 2'-deoxy-2'-fluoroadenosine-3'-phosphate
  modified_base 11: mod_base = OTHER; note = 2'-deoxy-2'-fluoroadenosine-3'-phosphate
  modified_base 12: mod_base = OTHER; note = 2'-O-methyluridine-3'-phosphate
  modified_base 13: mod_base = OTHER; note = 2'-O-methyluridine-3'-phosphate
  modified_base 14: mod_base = OTHER; note = 2'-O-methyluridine-3'-phosphate
  modified_base 15: mod_base = OTHER; note = 2'-O-methyladenosine-3'-phosphate
  modified_base 16: mod_base = OTHER; note = 2'-O-methyladenosine-3'-phosphate
  modified_base 17: mod_base = OTHER; note = 2'-O-methylcytidine-3'-phosphate
  modified_base 18: mod_base = OTHER; note = 2'-O-methyladenosine-3'-phosphate
  modified_base 19: mod_base = OTHER; note = 2'-O-methyladenosine-3'-phosphate
  modified_base 20: mod_base = OTHER; note = 2'-O-methyluridine-3'-phosphate
  modified_base 21: mod_base = OTHER; note = 2'-O-methyladenosine
tcaaaatacaatttaacaata

SEQ ID NO: 4500 - RNA, 21 nt, synthetic construct
  source 1..21: mol_type = other RNA
  modified_base 1: mod_base = OTHER; note = 2'-O-methylcytidine-3'-phosphate
  modified_base 2: mod_base = OTHER; note = 2'-O-methyladenosine-3'-phosphate
  modified_base 3: mod_base = OTHER; note = 2'-O-methyladenosine-3'-phosphate
  modified_base 4: mod_base = OTHER; note = 2'-O-methyluridine-3'-phosphate
  modified_base 5: mod_base = OTHER; note = 2'-O-methyluridine-3'-phosphate
  modified_base 6: mod_base = OTHER; note = 2'-O-methyluridine-3'-phosphate
  modified_base 7: mod_base = OTHER; note = 2'-deoxy-2'-fluoroadenosine-3'-phosphate
  modified_base 8: mod_base = OTHER; note = 2'-O-methyladenosine-3'-phosphate
  modified_base 9: mod_base = OTHER; note = 2'-deoxy-2'-fluorocytidine-3'-phosphate
  modified_base 10: mod_base = OTHER; note = 2'-deoxy-2'-fluoroadenosine-3'-phosphate
  modified_base 11: mod_base = OTHER; note = 2'-deoxy-2'-fluoroadenosine-3'-phosphate
  modified_base 12: mod_base = OTHER; note = 2'-O-methyluridine-3'-phosphate
  modified_base 13: mod_base = OTHER; note = 2'-O-methylguanosine-3'-phosphate
  modified_base 14: mod_base = OTHER; note = 2'-O-methylcytidine-3'-phosphate
  modified_base 15: mod_base = OTHER; note = 2'-O-methyladenosine-3'-phosphate
  modified_base 16: mod_base = OTHER; note = 2'-O-methyladenosine-3'-phosphate
  modified_base 17: mod_base = OTHER; note = 2'-O-methylcytidine-3'-phosphate
  modified_base 18: mod_base = OTHER; note = 2'-O-methyladenosine-3'-phosphate
  modified_base 19: mod_base = OTHER; note = 2'-O-methylguanosine-3'-phosphate
  modified_base 20: mod_base = OTHER; note = 2'-O-methyluridine-3'-phosphate
  modified_base 21: mod_base = OTHER; note = 2'-O-methyladenosine
caatttaacaatgcaacagta

SEQ ID NO: 4501 - RNA, 21 nt, synthetic construct
  source 1..21: mol_type = other RNA
  modified_base 1: mod_base = OTHER; note = 2'-O-methyluridine-3'-phosphate
  modified_base 2: mod_base = OTHER; note = 2'-O-methylcytidine-3'-phosphate
  modified_base 3: mod_base = OTHER; note = 2'-O-methyladenosine-3'-phosphate
  modified_base 4: mod_base = OTHER; note = 2'-O-methyluridine-3'-phosphate
  modified_base 5: mod_base = OTHER; note = 2'-O-methylcytidine-3'-phosphate
  modified_base 6: mod_base = OTHER; note = 2'-O-methyluridine-3'-phosphate
  modified_base 7: mod_base = OTHER; note = 2'-deoxy-2'-fluorouridine-3'-phosphate
  modified_base 8: mod_base = OTHER; note = 2'-O-methyladenosine-3'-phosphate
  modified_base 9: mod_base = OTHER; note = 2'-deoxy-2'-fluorocytidine-3'-phosphate
  modified_base 10: mod_base = OTHER; note = 2'-deoxy-2'-fluoroadenosine-3'-phosphate
  modified_base 11: mod_base = OTHER; note = 2'-deoxy-2'-fluoroguanosine-3'-phosphate
  modified_base 12: mod_base = OTHER; note = 2'-O-methylcytidine-3'-phosphate
  modified_base 13: mod_base = OTHER; note = 2'-O-methyladenosine-3'-phosphate
  modified_base 14: mod_base = OTHER; note = 2'-O-methylguanosine-3'-phosphate
  modified_base 15: mod_base = OTHER; note = 2'-O-methyladenosine-3'-phosphate
  modified_base 16: mod_base = OTHER; note = 2'-O-methylguanosine-3'-phosphate
  modified_base 17: mod_base = OTHER; note = 2'-O-methyladenosine-3'-phosphate
  modified_base 18: mod_base = OTHER; note = 2'-O-methyladenosine-3'-phosphate
  modified_base 19: mod_base = OTHER; note = 2'-O-methyladenosine-3'-phosphate
  modified_base 20: mod_base = OTHER; note = 2'-O-methyluridine-3'-phosphate
  modified_base 21: mod_base = OTHER; note = 2'-O-methyladenosine
tcatcttacagcagagaaata

SEQ ID NO: 4502 - RNA, 21 nt, synthetic construct
  source 1..21: mol_type = other RNA
  modified_base 1: mod_base = OTHER; note = 2'-O-methylcytidine-3'-phosphate
  modified_base 2: mod_base = OTHER; note = 2'-O-methyladenosine-3'-phosphate
  modified_base 3: mod_base = OTHER; note = 2'-O-methyluridine-3'-phosphate
  modified_base 4: mod_base = OTHER; note = 2'-O-methylcytidine-3'-phosphate
  modified_base 5: mod_base = OTHER; note = 2'-O-methyluridine-3'-phosphate
  modified_base 6: mod_base = OTHER; note = 2'-O-methyluridine-3'-phosphate
  modified_base 7: mod_base = OTHER; note = 2'-deoxy-2'-fluoroadenosine-3'-phosphate
  modified_base 8: mod_base = OTHER; note = 2'-O-methylcytidine-3'-phosphate
  modified_base 9: mod_base = OTHER; note = 2'-deoxy-2'-fluoroadenosine-3'-phosphate
  modified_base 10: mod_base = OTHER; note = 2'-deoxy-2'-fluoroguanosine-3'-phosphate
  modified_base 11: mod_base = OTHER; note = 2'-deoxy-2'-fluorocytidine-3'-phosphate
  modified_base 12: mod_base = OTHER; note = 2'-O-methyladenosine-3'-phosphate
  modified_base 13: mod_base = OTHER; note = 2'-O-methylguanosine-3'-phosphate
  modified_base 14: mod_base = OTHER; note = 2'-O-methyladenosine-3'-phosphate
  modified_base 15: mod_base = OTHER; note = 2'-O-methylguanosine-3'-phosphate
  modified_base 16: mod_base = OTHER; note = 2'-O-methyladenosine-3'-phosphate
  modified_base 17: mod_base = OTHER; note = 2'-O-methyladenosine-3'-phosphate
  modified_base 18: mod_base = OTHER; note = 2'-O-methyladenosine-3'-phosphate
  modified_base 19: mod_base = OTHER; note = 2'-O-methyluridine-3'-phosphate
  modified_base 20: mod_base = OTHER; note = 2'-O-methylguanosine-3'-phosphate
  modified_base 21: mod_base = OTHER; note = 2'-O-methyladenosine
catcttacagcagagaaatga

SEQ ID NO: 4503 - RNA, 21 nt, synthetic construct
  source 1..21: mol_type = other RNA
  modified_base 1: mod_base = OTHER; note = 2'-O-methyladenosine-3'-phosphate
  modified_base 2: mod_base = OTHER; note = 2'-O-methyluridine-3'-phosphate
  modified_base 3: mod_base = OTHER; note = 2'-O-methylcytidine-3'-phosphate
  modified_base 4: mod_base = OTHER; note = 2'-O-methyluridine-3'-phosphate
  modified_base 5: mod_base = OTHER; note = 2'-O-methyluridine-3'-phosphate
  modified_base 6: mod_base = OTHER; note = 2'-O-methyladenosine-3'-phosphate
  modified_base 7: mod_base = OTHER; note = 2'-deoxy-2'-fluorocytidine-3'-phosphate
  modified_base 8: mod_base = OTHER; note = 2'-O-methyladenosine-3'-phosphate
  modified_base 9: mod_base = OTHER; note = 2'-deoxy-2'-fluoroguanosine-3'-phosphate
  modified_base 10: mod_base = OTHER; note = 2'-deoxy-2'-fluorocytidine-3'-phosphate
  modified_base 11: mod_base = OTHER; note = 2'-deoxy-2'-fluoroadenosine-3'-phosphate
  modified_base 12: mod_base = OTHER; note = 2'-O-methylguanosine-3'-phosphate
  modified_base 13: mod_base = OTHER; note = 2'-O-methyladenosine-3'-phosphate
  modified_base 14: mod_base = OTHER; note = 2'-O-methylguanosine-3'-phosphate
  modified_base 15: mod_base = OTHER; note = 2'-O-methyladenosine-3'-phosphate
  modified_base 16: mod_base = OTHER; note = 2'-O-methyladenosine-3'-phosphate
  modified_base 17: mod_base = OTHER; note = 2'-O-methyladenosine-3'-phosphate
  modified_base 18: mod_base = OTHER; note = 2'-O-methyluridine-3'-phosphate
  modified_base 19: mod_base = OTHER; note = 2'-O-methylguanosine-3'-phosphate
  modified_base 20: mod_base = OTHER; note = 2'-O-methylcytidine-3'-phosphate
  modified_base 21: mod_base = OTHER; note = 2'-O-methyladenosine
atcttacagcagagaaatgca

SEQ ID NO: 4504 - RNA, 21 nt, synthetic construct
  source 1..21: mol_type = other RNA
  modified_base 1: mod_base = OTHER; note = 2'-O-methyluridine-3'-phosphate
  modified_base 2: mod_base = OTHER; note = 2'-O-methylcytidine-3'-phosphate
  modified_base 3: mod_base = OTHER; note = 2'-O-methyluridine-3'-phosphate
  modified_base 4: mod_base = OTHER; note = 2'-O-methyluridine-3'-phosphate
  modified_base 5: mod_base = OTHER; note = 2'-O-methyladenosine-3'-phosphate
  modified_base 6: mod_base = OTHER; note = 2'-O-methylcytidine-3'-phosphate
  modified_base 7: mod_base = OTHER; note = 2'-deoxy-2'-fluoroadenosine-3'-phosphate
  modified_base 8: mod_base = OTHER; note = 2'-O-methylguanosine-3'-phosphate
  modified_base 9: mod_base = OTHER; note = 2'-deoxy-2'-fluorocytidine-3'-phosphate
  modified_base 10: mod_base = OTHER; note = 2'-deoxy-2'-fluoroadenosine-3'-phosphate
  modified_base 11: mod_base = OTHER; note = 2'-deoxy-2'-fluoroguanosine-3'-phosphate
  modified_base 12: mod_base = OTHER; note = 2'-O-methyladenosine-3'-phosphate
  modified_base 13: mod_base = OTHER; note = 2'-O-methylguanosine-3'-phosphate
  modified_base 14: mod_base = OTHER; note = 2'-O-methyladenosine-3'-phosphate
  modified_base 15: mod_base = OTHER; note = 2'-O-methyladenosine-3'-phosphate
  modified_base 16: mod_base = OTHER; note = 2'-O-methyladenosine-3'-phosphate
  modified_base 17: mod_base = OTHER; note = 2'-O-methyluridine-3'-phosphate
  modified_base 18: mod_base = OTHER; note = 2'-O-methylguanosine-3'-phosphate
  modified_base 19: mod_base = OTHER; note = 2'-O-methylcytidine-3'-phosphate
  modified_base 20: mod_base = OTHER; note = 2'-O-methyladenosine-3'-phosphate
  modified_base 21: mod_base = OTHER; note = 2'-O-methyladenosine
tcttacagcagagaaatgcaa

SEQ ID NO: 4505 - RNA, 21 nt, synthetic construct
  source 1..21: mol_type = other RNA
  modified_base 1: mod_base = OTHER; note = 2'-O-methylcytidine-3'-phosphate
  modified_base 2: mod_base = OTHER; note = 2'-O-methyluridine-3'-phosphate
  modified_base 3: mod_base = OTHER; note = 2'-O-methyluridine-3'-phosphate
  modified_base 4: mod_base = OTHER; note = 2'-O-methyladenosine-3'-phosphate
  modified_base 5: mod_base = OTHER; note = 2'-O-methylcytidine-3'-phosphate
  modified_base 6: mod_base = OTHER; note = 2'-O-methyladenosine-3'-phosphate
  modified_base 7: mod_base = OTHER; note = 2'-deoxy-2'-fluoroguanosine-3'-phosphate
  modified_base 8: mod_base = OTHER; note = 2'-O-methylcytidine-3'-phosphate
  modified_base 9: mod_base = OTHER; note = 2'-deoxy-2'-fluoroadenosine-3'-phosphate
  modified_base 10: mod_base = OTHER; note = 2'-deoxy-2'-fluoroguanosine-3'-phosphate
  modified_base 11: mod_base = OTHER; note = 2'-deoxy-2'-fluoroadenosine-3'-phosphate
  modified_base 12: mod_base = OTHER; note = 2'-O-methylguanosine-3'-phosphate
  modified_base 13: mod_base = OTHER; note = 2'-O-methyladenosine-3'-phosphate
  modified_base 14: mod_base = OTHER; note = 2'-O-methyladenosine-3'-phosphate
  modified_base 15: mod_base = OTHER; note = 2'-O-methyladenosine-3'-phosphate
  modified_base 16: mod_base = OTHER; note = 2'-O-methyluridine-3'-phosphate
  modified_base 17: mod_base = OTHER; note = 2'-O-methylguanosine-3'-phosphate
  modified_base 18: mod_base = OTHER; note = 2'-O-methylcytidine-3'-phosphate
  modified_base 19: mod_base = OTHER; note = 2'-O-methyladenosine-3'-phosphate
  modified_base 20: mod_base = OTHER; note = 2'-O-methylguanosine-3'-phosphate
  modified_base 21: mod_base = OTHER; note = 2'-O-methyladenosine
cttacagcagagaaatgcaga

SEQ ID NO: 4506 - RNA, 21 nt, synthetic construct
  source 1..21: mol_type = other RNA
  modified_base 1: mod_base = OTHER; note = 2'-O-methyluridine-3'-phosphate
  modified_base 2: mod_base = OTHER; note = 2'-O-methyluridine-3'-phosphate
  modified_base 3: mod_base = OTHER; note = 2'-O-methyladenosine-3'-phosphate
  modified_base 4: mod_base = OTHER; note = 2'-O-methylcytidine-3'-phosphate
  modified_base 5: mod_base = OTHER; note = 2'-O-methyladenosine-3'-phosphate
  modified_base 6: mod_base = OTHER; note = 2'-O-methylguanosine-3'-phosphate
  modified_base 7: mod_base = OTHER; note = 2'-deoxy-2'-fluorocytidine-3'-phosphate
  modified_base 8: mod_base = OTHER; note = 2'-O-methyladenosine-3'-phosphate
  modified_base 9: mod_base = OTHER; note = 2'-deoxy-2'-fluoroguanosine-3'-phosphate
  modified_base 10: mod_base = OTHER; note = 2'-deoxy-2'-fluoroadenosine-3'-phosphate
  modified_base 11: mod_base = OTHER; note = 2'-deoxy-2'-fluoroguanosine-3'-phosphate
  modified_base 12: mod_base = OTHER; note = 2'-O-methyladenosine-3'-phosphate
  modified_base 13: mod_base = OTHER; note = 2'-O-methyladenosine-3'-phosphate
  modified_base 14: mod_base = OTHER; note = 2'-O-methyladenosine-3'-phosphate
  modified_base 15: mod_base = OTHER; note = 2'-O-methyluridine-3'-phosphate
  modified_base 16: mod_base = OTHER; note = 2'-O-methylguanosine-3'-phosphate
  modified_base 17: mod_base = OTHER; note = 2'-O-methylcytidine-3'-phosphate
  modified_base 18: mod_base = OTHER; note = 2'-O-methyladenosine-3'-phosphate
  modified_base 19: mod_base = OTHER; note = 2'-O-methylguanosine-3'-phosphate
  modified_base 20: mod_base = OTHER; note = 2'-O-methyladenosine-3'-phosphate
  modified_base 21: mod_base = OTHER; note = 2'-O-methyladenosine
ttacagcagagaaatgcagaa

SEQ ID NO: 4507 - RNA, 21 nt, synthetic construct
  source 1..21: mol_type = other RNA
  modified_base 1: mod_base = OTHER; note = 2'-O-methyluridine-3'-phosphate
  modified_base 2: mod_base = OTHER; note = 2'-O-methyladenosine-3'-phosphate
  modified_base 3: mod_base = OTHER; note = 2'-O-methylcytidine-3'-phosphate
  modified_base 4: mod_base = OTHER; note = 2'-O-methyladenosine-3'-phosphate
  modified_base 5: mod_base = OTHER; note = 2'-O-methylguanosine-3'-phosphate
  modified_base 6: mod_base = OTHER; note = 2'-O-methylcytidine-3'-phosphate
  modified_base 7: mod_base = OTHER; note = 2'-deoxy-2'-fluoroadenosine-3'-phosphate
  modified_base 8: mod_base = OTHER; note = 2'-O-methylguanosine-3'-phosphate
  modified_base 9: mod_base = OTHER; note = 2'-deoxy-2'-fluoroadenosine-3'-phosphate
  modified_base 10: mod_base = OTHER; note = 2'-deoxy-2'-fluoroguanosine-3'-phosphate
  modified_base 11: mod_base = OTHER; note = 2'-deoxy-2'-fluoroadenosine-3'-phosphate
  modified_base 12: mod_base = OTHER; note = 2'-O-methyladenosine-3'-phosphate
  modified_base 13: mod_base = OTHER; note = 2'-O-methyladenosine-3'-phosphate
  modified_base 14: mod_base = OTHER; note = 2'-O-methyluridine-3'-phosphate
  modified_base 15: mod_base = OTHER; note = 2'-O-methylguanosine-3'-phosphate
  modified_base 16: mod_base = OTHER; note = 2'-O-methylcytidine-3'-phosphate
  modified_base 17: mod_base = OTHER; note = 2'-O-methyladenosine-3'-phosphate
  modified_base 18: mod_base = OTHER; note = 2'-O-methylguanosine-3'-phosphate
  modified_base 19: mod_base = OTHER; note = 2'-O-methyladenosine-3'-phosphate
  modified_base 20: mod_base = OTHER; note = 2'-O-methylguanosine-3'-phosphate
  modified_base 21: mod_base = OTHER; note = 2'-O-methyladenosine
tacagcagagaaatgcagaga

SEQ ID NO: 4508 - RNA, 21 nt, synthetic construct
  source 1..21: mol_type = other RNA
  modified_base 1: mod_base = OTHER; note = 2'-O-methyladenosine-3'-phosphate
  modified_base 2: mod_base = OTHER; note = 2'-O-methylcytidine-3'-phosphate
  modified_base 3: mod_base = OTHER; note = 2'-O-methyladenosine-3'-phosphate
  modified_base 4: mod_base = OTHER; note = 2'-O-methylguanosine-3'-phosphate
  modified_base 5: mod_base = OTHER; note = 2'-O-methylcytidine-3'-phosphate
  modified_base 6: mod_base = OTHER; note = 2'-O-methyladenosine-3'-phosphate
  modified_base 7: mod_base = OTHER; note = 2'-deoxy-2'-fluoroguanosine-3'-phosphate
  modified_base 8: mod_base = OTHER; note = 2'-O-methyladenosine-3'-phosphate
  modified_base 9: mod_base = OTHER; note = 2'-deoxy-2'-fluoroguanosine-3'-phosphate
  modified_base 10: mod_base = OTHER; note = 2'-deoxy-2'-fluoroadenosine-3'-phosphate
  modified_base 11: mod_base = OTHER; note = 2'-deoxy-2'-fluoroadenosine-3'-phosphate
  modified_base 12: mod_base = OTHER; note = 2'-O-methyladenosine-3'-phosphate
  modified_base 13: mod_base = OTHER; note = 2'-O-methyluridine-3'-phosphate
  modified_base 14: mod_base = OTHER; note = 2'-O-methylguanosine-3'-phosphate
  modified_base 15: mod_base = OTHER; note = 2'-O-methylcytidine-3'-phosphate
  modified_base 16: mod_base = OTHER; note = 2'-O-methyladenosine-3'-phosphate
  modified_base 17: mod_base = OTHER; note = 2'-O-methylguanosine-3'-phosphate
  modified_base 18: mod_base = OTHER; note = 2'-O-methyladenosine-3'-phosphate
  modified_base 19: mod_base = OTHER; note = 2'-O-methylguanosine-3'-phosphate
  modified_base 20: mod_base = OTHER; note = 2'-O-methyladenosine-3'-phosphate
  modified_base 21: mod_base = OTHER; note = 2'-O-methyladenosine
acagcagagaaatgcagagaa

SEQ ID NO: 4509 - RNA, 21 nt, synthetic construct
  source 1..21: mol_type = other RNA
  modified_base 1: mod_base = OTHER; note = 2'-O-methylcytidine-3'-phosphate
  modified_base 2: mod_base = OTHER; note = 2'-O-methyladenosine-3'-phosphate
  modified_base 3: mod_base = OTHER; note = 2'-O-methylguanosine-3'-phosphate
  modified_base 4: mod_base = OTHER; note = 2'-O-methylcytidine-3'-phosphate
  modified_base 5: mod_base = OTHER; note = 2'-O-methyladenosine-3'-phosphate
  modified_base 6: mod_base = OTHER; note = 2'-O-methylguanosine-3'-phosphate
  modified_base 7: mod_base = OTHER; note = 2'-deoxy-2'-fluoroadenosine-3'-phosphate
  modified_base 8: mod_base = OTHER; note = 2'-O-methylguanosine-3'-phosphate
  modified_base 9: mod_base = OTHER; note = 2'-deoxy-2'-fluoroadenosine-3'-phosphate
  modified_base 10: mod_base = OTHER; note = 2'-deoxy-2'-fluoroadenosine-3'-phosphate
  modified_base 11: mod_base = OTHER; note = 2'-deoxy-2'-fluoroadenosine-3'-phosphate
  modified_base 12: mod_base = OTHER; note = 2'-O-methyluridine-3'-phosphate
  modified_base 13: mod_base = OTHER; note = 2'-O-methylguanosine-3'-phosphate
  modified_base 14: mod_base = OTHER; note = 2'-O-methylcytidine-3'-phosphate
  modified_base 15: mod_base = OTHER; note = 2'-O-methyladenosine-3'-phosphate
  modified_base 16: mod_base = OTHER; note = 2'-O-methylguanosine-3'-phosphate
  modified_base 17: mod_base = OTHER; note = 2'-O-methyladenosine-3'-phosphate
  modified_base 18: mod_base = OTHER; note = 2'-O-methylguanosine-3'-phosphate
  modified_base 19: mod_base = OTHER; note = 2'-O-methyladenosine-3'-phosphate
  modified_base 20: mod_base = OTHER; note = 2'-O-methyladenosine-3'-phosphate
  modified_base 21: mod_base = OTHER; note = 2'-O-methyladenosine
cagcagagaaatgcagagaaa

SEQ ID NO: 4510 - RNA, 21 nt, synthetic construct
  source 1..21: mol_type = other RNA
  modified_base 1: mod_base = OTHER; note = 2'-O-methyladenosine-3'-phosphate
  modified_base 2: mod_base = OTHER; note = 2'-O-methylguanosine-3'-phosphate
  modified_base 3: mod_base = OTHER; note = 2'-O-methylcytidine-3'-phosphate
  modified_base 4: mod_base = OTHER; note = 2'-O-methyladenosine-3'-phosphate
  modified_base 5: mod_base = OTHER; note = 2'-O-methylguanosine-3'-phosphate
  modified_base 6: mod_base = OTHER; note = 2'-O-methyladenosine-3'-phosphate
  modified_base 7: mod_base = OTHER; note = 2'-deoxy-2'-fluoroguanosine-3'-phosphate
  modified_base 8: mod_base = OTHER; note = 2'-O-methyladenosine-3'-phosphate
  modified_base 9: mod_base = OTHER; note = 2'-deoxy-2'-fluoroadenosine-3'-phosphate
  modified_base 10: mod_base = OTHER; note = 2'-deoxy-2'-fluoroadenosine-3'-phosphate
  modified_base 11: mod_base = OTHER; note = 2'-deoxy-2'-fluorouridine-3'-phosphate
  modified_base 12: mod_base = OTHER; note = 2'-O-methylguanosine-3'-phosphate
  modified_base 13: mod_base = OTHER; note = 2'-O-methylcytidine-3'-phosphate
  modified_base 14: mod_base = OTHER; note = 2'-O-methyladenosine-3'-phosphate
  modified_base 15: mod_base = OTHER; note = 2'-O-methylguanosine-3'-phosphate
  modified_base 16: mod_base = OTHER; note = 2'-O-methyladenosine-3'-phosphate
  modified_base 17: mod_base = OTHER; note = 2'-O-methylguanosine-3'-phosphate
  modified_base 18: mod_base = OTHER; note = 2'-O-methyladenosine-3'-phosphate
  modified_base 19: mod_base = OTHER; note = 2'-O-methyladenosine-3'-phosphate
  modified_base 20: mod_base = OTHER; note = 2'-O-methyladenosine-3'-phosphate
  modified_base 21: mod_base = OTHER; note = 2'-O-methyladenosine
agcagagaaatgcagagaaaa

SEQ ID NO: 4511 - RNA, 21 nt, synthetic construct
  source 1..21: mol_type = other RNA
  modified_base 1: mod_base = OTHER; note = 2'-O-methylguanosine-3'-phosphate
  modified_base 2: mod_base = OTHER; note = 2'-O-methylcytidine-3'-phosphate
  modified_base 3: mod_base = OTHER; note = 2'-O-methyladenosine-3'-phosphate
  modified_base 4: mod_base = OTHER; note = 2'-O-methylguanosine-3'-phosphate
  modified_base 5: mod_base = OTHER; note = 2'-O-methyladenosine-3'-phosphate
  modified_base 6: mod_base = OTHER; note = 2'-O-methylguanosine-3'-phosphate
  modified_base 7: mod_base = OTHER; note = 2'-deoxy-2'-fluoroadenosine-3'-phosphate
  modified_base 8: mod_base = OTHER; note = 2'-O-methyladenosine-3'-phosphate
  modified_base 9: mod_base = OTHER; note = 2'-deoxy-2'-fluoroadenosine-3'-phosphate
  modified_base 10: mod_base = OTHER; note = 2'-deoxy-2'-fluorouridine-3'-phosphate
  modified_base 11: mod_base = OTHER; note = 2'-deoxy-2'-fluoroguanosine-3'-phosphate
  modified_base 12: mod_base = OTHER; note = 2'-O-methylcytidine-3'-phosphate
  modified_base 13: mod_base = OTHER; note = 2'-O-methyladenosine-3'-phosphate
  modified_base 14: mod_base = OTHER; note = 2'-O-methylguanosine-3'-phosphate
  modified_base 15: mod_base = OTHER; note = 2'-O-methyladenosine-3'-phosphate
  modified_base 16: mod_base = OTHER; note = 2'-O-methylguanosine-3'-phosphate
  modified_base 17: mod_base = OTHER; note = 2'-O-methyladenosine-3'-phosphate
  modified_base 18: mod_base = OTHER; note = 2'-O-methyladenosine-3'-phosphate
  modified_base 19: mod_base = OTHER; note = 2'-O-methyladenosine-3'-phosphate
  modified_base 20: mod_base = OTHER; note = 2'-O-methyladenosine-3'-phosphate
  modified_base 21: mod_base = OTHER; note = 2'-O-methyladenosine
gcagagaaatgcagagaaaaa

SEQ ID NO: 4512 - RNA, 21 nt, synthetic construct
  source 1..21: mol_type = other RNA
  modified_base 1: mod_base = OTHER; note = 2'-O-methylcytidine-3'-phosphate
  modified_base 2: mod_base = OTHER; note = 2'-O-methyladenosine-3'-phosphate
  modified_base 3: mod_base = OTHER; note = 2'-O-methylguanosine-3'-phosphate
  modified_base 4: mod_base = OTHER; note = 2'-O-methyladenosine-3'-phosphate
  modified_base 5: mod_base = OTHER; note = 2'-O-methylguanosine-3'-phosphate
  modified_base 6: mod_base = OTHER; note = 2'-O-methyladenosine-3'-phosphate
  modified_base 7: mod_base = OTHER; note = 2'-deoxy-2'-fluoroadenosine-3'-phosphate
  modified_base 8: mod_base = OTHER; note = 2'-O-methyladenosine-3'-phosphate
  modified_base 9: mod_base = OTHER; note = 2'-deoxy-2'-fluorouridine-3'-phosphate
  modified_base 10: mod_base = OTHER; note = 2'-deoxy-2'-fluoroguanosine-3'-phosphate
  modified_base 11: mod_base = OTHER; note = 2'-deoxy-2'-fluorocytidine-3'-phosphate
  modified_base 12: mod_base = OTHER; note = 2'-O-methyladenosine-3'-phosphate
  modified_base 13: mod_base = OTHER; note = 2'-O-methylguanosine-3'-phosphate
  modified_base 14: mod_base = OTHER; note = 2'-O-methyladenosine-3'-phosphate
  modified_base 15: mod_base = OTHER; note = 2'-O-methylguanosine-3'-phosphate
  modified_base 16: mod_base = OTHER; note = 2'-O-methyladenosine-3'-phosphate
  modified_base 17: mod_base = OTHER; note = 2'-O-methyladenosine-3'-phosphate
  modified_base 18: mod_base = OTHER; note = 2'-O-methyladenosine-3'-phosphate
  modified_base 19: mod_base = OTHER; note = 2'-O-methyladenosine-3'-phosphate
  modified_base 20: mod_base = OTHER; note = 2'-O-methylguanosine-3'-phosphate
  modified_base 21: mod_base = OTHER; note = 2'-O-methyladenosine
cagagaaatgcagagaaaaga

SEQ ID NO: 4513 - RNA, 21 nt, synthetic construct
  source 1..21: mol_type = other RNA
  modified_base 1: mod_base = OTHER; note = 2'-O-methyladenosine-3'-phosphate
  modified_base 2: mod_base = OTHER; note = 2'-O-methylguanosine-3'-phosphate
  modified_base 3: mod_base = OTHER; note = 2'-O-methyladenosine-3'-phosphate
  modified_base 4: mod_base = OTHER; note = 2'-O-methylguanosine-3'-phosphate
  modified_base 5: mod_base = OTHER; note = 2'-O-methyladenosine-3'-phosphate
  modified_base 6: mod_base = OTHER; note = 2'-O-methyladenosine-3'-phosphate
  modified_base 7: mod_base = OTHER; note = 2'-deoxy-2'-fluoroadenosine-3'-phosphate
  modified_base 8: mod_base = OTHER; note = 2'-O-methyluridine-3'-phosphate
  modified_base 9: mod_base = OTHER; note = 2'-deoxy-2'-fluoroguanosine-3'-phosphate
  modified_base 10: mod_base = OTHER; note = 2'-deoxy-2'-fluorocytidine-3'-phosphate
  modified_base 11: mod_base = OTHER; note = 2'-deoxy-2'-fluoroadenosine-3'-phosphate
  modified_base 12: mod_base = OTHER; note = 2'-O-methylguanosine-3'-phosphate
  modified_base 13: mod_base = OTHER; note = 2'-O-methyladenosine-3'-phosphate
  modified_base 14: mod_base = OTHER; note = 2'-O-methylguanosine-3'-phosphate
  modified_base 15: mod_base = OTHER; note = 2'-O-methyladenosine-3'-phosphate
  modified_base 16: mod_base = OTHER; note = 2'-O-methyladenosine-3'-phosphate
  modified_base 17: mod_base = OTHER; note = 2'-O-methyladenosine-3'-phosphate
  modified_base 18: mod_base = OTHER; note = 2'-O-methyladenosine-3'-phosphate
  modified_base 19: mod_base = OTHER; note = 2'-O-methylguanosine-3'-phosphate
  modified_base 20: mod_base = OTHER; note = 2'-O-methylcytidine-3'-phosphate
  modified_base 21: mod_base = OTHER; note = 2'-O-methyladenosine
agagaaatgcagagaaaagca

SEQ ID NO: 4514 - RNA, 21 nt, synthetic construct
  source 1..21: mol_type = other RNA
  modified_base 1: mod_base = OTHER; note = 2'-O-methylguanosine-3'-phosphate
  modified_base 2: mod_base = OTHER; note = 2'-O-methyladenosine-3'-phosphate
  modified_base 3: mod_base = OTHER; note = 2'-O-methylguanosine-3'-phosphate
  modified_base 4: mod_base = OTHER; note = 2'-O-methyladenosine-3'-phosphate
  modified_base 5: mod_base = OTHER; note = 2'-O-methyladenosine-3'-phosphate
  modified_base 6: mod_base = OTHER; note = 2'-O-methyladenosine-3'-phosphate
  modified_base 7: mod_base = OTHER; note = 2'-deoxy-2'-fluorouridine-3'-phosphate
  modified_base 8: mod_base = OTHER; note = 2'-O-methylguanosine-3'-phosphate
  modified_base 9: mod_base = OTHER; note = 2'-deoxy-2'-fluorocytidine-3'-phosphate
  modified_base 10: mod_base = OTHER; note = 2'-deoxy-2'-fluoroadenosine-3'-phosphate
  modified_base 11: mod_base = OTHER; note = 2'-deoxy-2'-fluoroguanosine-3'-phosphate
  modified_base 12: mod_base = OTHER; note = 2'-O-methyladenosine-3'-phosphate
  modified_base 13: mod_base = OTHER; note = 2'-O-methylguanosine-3'-phosphate
  modified_base 14: mod_base = OTHER; note = 2'-O-methyladenosine-3'-phosphate
  modified_base 15: mod_base = OTHER; note = 2'-O-methyladenosine-3'-phosphate
  modified_base 16: mod_base = OTHER; note = 2'-O-methyladenosine-3'-phosphate
  modified_base 17: mod_base = OTHER; note = 2'-O-methyladenosine-3'-phosphate
  modified_base 18: mod_base = OTHER; note = 2'-O-methylguanosine-3'-phosphate
  modified_base 19: mod_base = OTHER; note = 2'-O-methylcytidine-3'-phosphate
  modified_base 20: mod_base = OTHER; note = 2'-O-methyladenosine-3'-phosphate
  modified_base 21: mod_base = OTHER; note = 2'-O-methyladenosine
gagaaatgcagagaaaagcaa

SEQ ID NO: 4515 - RNA, 21 nt, synthetic construct
  source 1..21: mol_type = other RNA
  modified_base 1: mod_base = OTHER; note = 2'-O-methyladenosine-3'-phosphate
  modified_base 2: mod_base = OTHER; note = 2'-O-methylguanosine-3'-phosphate
  modified_base 3: mod_base = OTHER; note = 2'-O-methyladenosine-3'-phosphate
  modified_base 4: mod_base = OTHER; note = 2'-O-methyladenosine-3'-phosphate
  modified_base 5: mod_base = OTHER; note = 2'-O-methyladenosine-3'-phosphate
  modified_base 6: mod_base = OTHER; note = 2'-O-methyluridine-3'-phosphate
  modified_base 7: mod_base = OTHER; note = 2'-deoxy-2'-fluoroguanosine-3'-phosphate
  modified_base 8: mod_base = OTHER; note = 2'-O-methylcytidine-3'-phosphate
  modified_base 9: mod_base = OTHER; note = 2'-deoxy-2'-fluoroadenosine-3'-phosphate
  modified_base 10: mod_base = OTHER; note = 2'-deoxy-2'-fluoroguanosine-3'-phosphate
  modified_base 11: mod_base = OTHER; note = 2'-deoxy-2'-fluoroadenosine-3'-phosphate
  modified_base 12: mod_base = OTHER; note = 2'-O-methylguanosine-3'-phosphate
  modified_base 13: mod_base = OTHER; note = 2'-O-methyladenosine-3'-phosphate
  modified_base 14: mod_base = OTHER; note = 2'-O-methyladenosine-3'-phosphate
  modified_base 15: mod_base = OTHER; note = 2'-O-methyladenosine-3'-phosphate
  modified_base 16: mod_base = OTHER; note = 2'-O-methyladenosine-3'-phosphate
  modified_base 17: mod_base = OTHER; note = 2'-O-methylguanosine-3'-phosphate
  modified_base 18: mod_base = OTHER; note = 2'-O-methylcytidine-3'-phosphate
  modified_base 19: mod_base = OTHER; note = 2'-O-methyladenosine-3'-phosphate
  modified_base 20: mod_base = OTHER; note = 2'-O-methyladenosine-3'-phosphate
  modified_base 21: mod_base = OTHER; note = 2'-O-methyladenosine
agaaatgcagagaaaagcaaa

SEQ ID NO: 4516 - RNA, 21 nt, synthetic construct
  source 1..21: mol_type = other RNA
  modified_base 1: mod_base = OTHER; note = 2'-O-methylguanosine-3'-phosphate
  modified_base 2: mod_base = OTHER; note = 2'-O-methyladenosine-3'-phosphate
  modified_base 3: mod_base = OTHER; note = 2'-O-methyladenosine-3'-phosphate
  modified_base 4: mod_base = OTHER; note = 2'-O-methyladenosine-3'-phosphate
  modified_base 5: mod_base = OTHER; note = 2'-O-methyluridine-3'-phosphate
  modified_base 6: mod_base = OTHER; note = 2'-O-methylguanosine-3'-phosphate
  modified_base 7: mod_base = OTHER; note = 2'-deoxy-2'-fluorocytidine-3'-phosphate
  modified_base 8: mod_base = OTHER; note = 2'-O-methyladenosine-3'-phosphate
  modified_base 9: mod_base = OTHER; note = 2'-deoxy-2'-fluoroguanosine-3'-phosphate
  modified_base 10: mod_base = OTHER; note = 2'-deoxy-2'-fluoroadenosine-3'-phosphate
  modified_base 11: mod_base = OTHER; note = 2'-deoxy-2'-fluoroguanosine-3'-phosphate
  modified_base 12: mod_base = OTHER; note = 2'-O-methyladenosine-3'-phosphate
  modified_base 13: mod_base = OTHER; note = 2'-O-methyladenosine-3'-phosphate
  modified_base 14: mod_base = OTHER; note = 2'-O-methyladenosine-3'-phosphate
  modified_base 15: mod_base = OTHER; note = 2'-O-methyladenosine-3'-phosphate
  modified_base 16: mod_base = OTHER; note = 2'-O-methylguanosine-3'-phosphate
  modified_base 17: mod_base = OTHER; note = 2'-O-methylcytidine-3'-phosphate
  modified_base 18: mod_base = OTHER; note = 2'-O-methyladenosine-3'-phosphate
  modified_base 19: mod_base = OTHER; note = 2'-O-methyladenosine-3'-phosphate
  modified_base 20: mod_base = OTHER; note = 2'-O-methyladenosine-3'-phosphate
  modified_base 21: mod_base = OTHER; note = 2'-O-methyladenosine
gaaatgcagagaaaagcaaaa

SEQ ID NO: 4517 - RNA, 21 nt, synthetic construct
  source 1..21: mol_type = other RNA
  modified_base 1: mod_base = OTHER; note = 2'-O-methyladenosine-3'-phosphate
  modified_base 2: mod_base = OTHER; note = 2'-O-methyladenosine-3'-phosphate
  modified_base 3: mod_base = OTHER; note = 2'-O-methyladenosine-3'-phosphate
  modified_base 4: mod_base = OTHER; note = 2'-O-methyluridine-3'-phosphate
  modified_base 5: mod_base = OTHER; note = 2'-O-methylguanosine-3'-phosphate
  modified_base 6: mod_base = OTHER; note = 2'-O-methylcytidine-3'-phosphate
  modified_base 7: mod_base = OTHER; note = 2'-deoxy-2'-fluoroadenosine-3'-phosphate
  modified_base 8: mod_base = OTHER; note = 2'-O-methylguanosine-3'-phosphate
  modified_base 9: mod_base = OTHER; note = 2'-deoxy-2'-fluoroadenosine-3'-phosphate
  modified_base 10: mod_base = OTHER; note = 2'-deoxy-2'-fluoroguanosine-3'-phosphate
  modified_base 11: mod_base = OTHER; note = 2'-deoxy-2'-fluoroadenosine-3'-phosphate
  modified_base 12: mod_base = OTHER; note = 2'-O-methyladenosine-3'-phosphate
  modified_base 13: mod_base = OTHER; note = 2'-O-methyladenosine-3'-phosphate
  modified_base 14: mod_base = OTHER; note = 2'-O-methyladenosine-3'-phosphate
  modified_base 15: mod_base = OTHER; note = 2'-O-methylguanosine-3'-phosphate
  modified_base 16: mod_base = OTHER; note = 2'-O-methylcytidine-3'-phosphate
  modified_base 17: mod_base = OTHER; note = 2'-O-methyladenosine-3'-phosphate
  modified_base 18: mod_base = OTHER; note = 2'-O-methyladenosine-3'-phosphate
  modified_base 19: mod_base = OTHER; note = 2'-O-methyladenosine-3'-phosphate
  modified_base 20: mod_base = OTHER; note = 2'-O-methyladenosine-3'-phosphate
  modified_base 21: mod_base = OTHER; note = 2'-O-methyladenosine
aaatgcagagaaaagcaaaaa

SEQ ID NO: 4518 - RNA, 21 nt, synthetic construct
  source 1..21: mol_type = other RNA
  modified_base 1: mod_base = OTHER; note = 2'-O-methyladenosine-3'-phosphate
  modified_base 2: mod_base = OTHER; note = 2'-O-methyladenosine-3'-phosphate
  modified_base 3: mod_base = OTHER; note = 2'-O-methyluridine-3'-phosphate
  modified_base 4: mod_base = OTHER; note = 2'-O-methylguanosine-3'-phosphate
  modified_base 5: mod_base = OTHER; note = 2'-O-methylcytidine-3'-phosphate
  modified_base 6: mod_base = OTHER; note = 2'-O-methyladenosine-3'-phosphate
  modified_base 7: mod_base = OTHER; note = 2'-deoxy-2'-fluoroguanosine-3'-phosphate
  modified_base 8: mod_base = OTHER; note = 2'-O-methyladenosine-3'-phosphate
  modified_base 9: mod_base = OTHER; note = 2'-deoxy-2'-fluoroguanosine-3'-phosphate
  modified_base 10: mod_base = OTHER; note = 2'-deoxy-2'-fluoroadenosine-3'-phosphate
  modified_base 11: mod_base = OTHER; note = 2'-deoxy-2'-fluoroadenosine-3'-phosphate
  modified_base 12: mod_base = OTHER; note = 2'-O-methyladenosine-3'-phosphate
  modified_base 13: mod_base = OTHER; note = 2'-O-methyladenosine-3'-phosphate
  modified_base 14: mod_base = OTHER; note = 2'-O-methylguanosine-3'-phosphate
  modified_base 15: mod_base = OTHER; note = 2'-O-methylcytidine-3'-phosphate
  modified_base 16: mod_base = OTHER; note = 2'-O-methyladenosine-3'-phosphate
  modified_base 17: mod_base = OTHER; note = 2'-O-methyladenosine-3'-phosphate
  modified_base 18: mod_base = OTHER; note = 2'-O-methyladenosine-3'-phosphate
  modified_base 19: mod_base = OTHER; note = 2'-O-methyladenosine-3'-phosphate
  modified_base 20: mod_base = OTHER; note = 2'-O-methylcytidine-3'-phosphate
  modified_base 21: mod_base = OTHER; note = 2'-O-methyladenosine
aatgcagagaaaagcaaaaca

SEQ ID NO: 4519 - RNA, 21 nt, synthetic construct
  source 1..21: mol_type = other RNA
  modified_base 1: mod_base = OTHER; note = 2'-O-methyladenosine-3'-phosphate
  modified_base 2: mod_base = OTHER; note = 2'-O-methyluridine-3'-phosphate
  modified_base 3: mod_base = OTHER; note = 2'-O-methylguanosine-3'-phosphate
  modified_base 4: mod_base = OTHER; note = 2'-O-methylcytidine-3'-phosphate
  modified_base 5: mod_base = OTHER; note = 2'-O-methyladenosine-3'-phosphate
  modified_base 6: mod_base = OTHER; note = 2'-O-methylguanosine-3'-phosphate
  modified_base 7: mod_base = OTHER; note = 2'-deoxy-2'-fluoroadenosine-3'-phosphate
  modified_base 8: mod_base = OTHER; note = 2'-O-methylguanosine-3'-phosphate
  modified_base 9: mod_base = OTHER; note = 2'-deoxy-2'-fluoroadenosine-3'-phosphate
  modified_base 10: mod_base = OTHER; note = 2'-deoxy-2'-fluoroadenosine-3'-phosphate
  modified_base 11: mod_base = OTHER; note = 2'-deoxy-2'-fluoroadenosine-3'-phosphate
  modified_base 12: mod_base = OTHER; note = 2'-O-methyladenosine-3'-phosphate
  modified_base 13: mod_base = OTHER; note = 2'-O-methylguanosine-3'-phosphate
  modified_base 14: mod_base = OTHER; note = 2'-O-methylcytidine-3'-phosphate
  modified_base 15: mod_base = OTHER; note = 2'-O-methyladenosine-3'-phosphate
  modified_base 16: mod_base = OTHER; note = 2'-O-methyladenosine-3'-phosphate
  modified_base 17: mod_base = OTHER; note = 2'-O-methyladenosine-3'-phosphate
  modified_base 18: mod_base = OTHER; note = 2'-O-methyladenosine-3'-phosphate
  modified_base 19: mod_base = OTHER; note = 2'-O-methylcytidine-3'-phosphate
  modified_base 20: mod_base = OTHER; note = 2'-O-methyluridine-3'-phosphate
  modified_base 21: mod_base = OTHER; note = 2'-O-methyladenosine
atgcagagaaaagcaaaacta

SEQ ID NO: 4520 - RNA, 21 nt, synthetic construct
  source 1..21: mol_type = other RNA
  modified_base 1: mod_base = OTHER; note = 2'-O-methyluridine-3'-phosphate
  modified_base 2: mod_base = OTHER; note = 2'-O-methylguanosine-3'-phosphate
  modified_base 3: mod_base = OTHER; note = 2'-O-methylcytidine-3'-phosphate
  modified_base 4: mod_base = OTHER; note = 2'-O-methyladenosine-3'-phosphate
  modified_base 5: mod_base = OTHER; note = 2'-O-methylguanosine-3'-phosphate
  modified_base 6: mod_base = OTHER; note = 2'-O-methyladenosine-3'-phosphate
  modified_base 7: mod_base = OTHER; note = 2'-deoxy-2'-fluoroguanosine-3'-phosphate
  modified_base 8: mod_base = OTHER; note = 2'-O-methyladenosine-3'-phosphate
  modified_base 9: mod_base = OTHER; note = 2'-deoxy-2'-fluoroadenosine-3'-phosphate
  modified_base 10: mod_base = OTHER; note = 2'-deoxy-2'-fluoroadenosine-3'-phosphate
  modified_base 11: mod_base = OTHER; note = 2'-deoxy-2'-fluoroadenosine-3'-phosphate
  modified_base 12: mod_base = OTHER; note = 2'-O-methylguanosine-3'-phosphate
  modified_base 13: mod_base = OTHER; note = 2'-O-methylcytidine-3'-phosphate
  modified_base 14: mod_base = OTHER; note = 2'-O-methyladenosine-3'-phosphate
  modified_base 15: mod_base = OTHER; note = 2'-O-methyladenosine-3'-phosphate
  modified_base 16: mod_base = OTHER; note = 2'-O-methyladenosine-3'-phosphate
  modified_base 17: mod_base = OTHER; note = 2'-O-methyladenosine-3'-phosphate
  modified_base 18: mod_base = OTHER; note = 2'-O-methylcytidine-3'-phosphate
  modified_base 19: mod_base = OTHER; note = 2'-O-methyluridine-3'-phosphate
  modified_base 20: mod_base = OTHER; note = 2'-O-methylguanosine-3'-phosphate
  modified_base 21: mod_base = OTHER; note = 2'-O-methyladenosine
tgcagagaaaagcaaaactga

SEQ ID NO: 4521 - RNA, 21 nt, synthetic construct
  source 1..21: mol_type = other RNA
  modified_base 1: mod_base = OTHER; note = 2'-O-methylguanosine-3'-phosphate
  modified_base 2: mod_base = OTHER; note = 2'-O-methylcytidine-3'-phosphate
  modified_base 3: mod_base = OTHER; note = 2'-O-methyladenosine-3'-phosphate
  modified_base 4: mod_base = OTHER; note = 2'-O-methylguanosine-3'-phosphate
  modified_base 5: mod_base = OTHER; note = 2'-O-methyladenosine-3'-phosphate
  modified_base 6: mod_base = OTHER; note = 2'-O-methylguanosine-3'-phosphate
  modified_base 7: mod_base = OTHER; note = 2'-deoxy-2'-fluoroadenosine-3'-phosphate
  modified_base 8: mod_base = OTHER; note = 2'-O-methyladenosine-3'-phosphate
  modified_base 9: mod_base = OTHER; note = 2'-deoxy-2'-fluoroadenosine-3'-phosphate
  modified_base 10: mod_base = OTHER; note = 2'-deoxy-2'-fluoroadenosine-3'-phosphate
  modified_base 11: mod_base = OTHER; note = 2'-deoxy-2'-fluoroguanosine-3'-phosphate
  modified_base 12: mod_base = OTHER; note = 2'-O-methylcytidine-3'-phosphate
  modified_base 13: mod_base = OTHER; note = 2'-O-methyladenosine-3'-phosphate
  modified_base 14: mod_base = OTHER; note = 2'-O-methyladenosine-3'-phosphate
  modified_base 15: mod_base = OTHER; note = 2'-O-methyladenosine-3'-phosphate
  modified_base 16: mod_base = OTHER; note = 2'-O-methyladenosine-3'-phosphate
  modified_base 17: mod_base = OTHER; note = 2'-O-methylcytidine-3'-phosphate
  modified_base 18: mod_base = OTHER; note = 2'-O-methyluridine-3'-phosphate
  modified_base 19: mod_base = OTHER; note = 2'-O-methylguanosine-3'-phosphate
  modified_base 20: mod_base = OTHER; note = 2'-O-methylcytidine-3'-phosphate
  modified_base 21: mod_base = OTHER; note = 2'-O-methyladenosine
gcagagaaaagcaaaactgca

SEQ ID NO: 4522 - RNA, 21 nt, synthetic construct
  source 1..21: mol_type = other RNA
  modified_base 1: mod_base = OTHER; note = 2'-O-methylcytidine-3'-phosphate
  modified_base 2: mod_base = OTHER; note = 2'-O-methyladenosine-3'-phosphate
  modified_base 3: mod_base = OTHER; note = 2'-O-methylguanosine-3'-phosphate
  modified_base 4: mod_base = OTHER; note = 2'-O-methyladenosine-3'-phosphate
  modified_base 5: mod_base = OTHER; note = 2'-O-methylguanosine-3'-phosphate
  modified_base 6: mod_base = OTHER; note = 2'-O-methyladenosine-3'-phosphate
  modified_base 7: mod_base = OTHER; note = 2'-deoxy-2'-fluoroadenosine-3'-phosphate
  modified_base 8: mod_base = OTHER; note = 2'-O-methyladenosine-3'-phosphate
  modified_base 9: mod_base = OTHER; note = 2'-deoxy-2'-fluoroadenosine-3'-phosphate
  modified_base 10: mod_base = OTHER; note = 2'-deoxy-2'-fluoroguanosine-3'-phosphate
  modified_base 11: mod_base = OTHER; note = 2'-deoxy-2'-fluorocytidine-3'-phosphate
  modified_base 12: mod_base = OTHER; note = 2'-O-methyladenosine-3'-phosphate
  modified_base 13: mod_base = OTHER; note = 2'-O-methyladenosine-3'-phosphate
  modified_base 14: mod_base = OTHER; note = 2'-O-methyladenosine-3'-phosphate
  modified_base 15: mod_base = OTHER; note = 2'-O-methyladenosine-3'-phosphate
  modified_base 16: mod_base = OTHER; note = 2'-O-methylcytidine-3'-phosphate
  modified_base 17: mod_base = OTHER; note = 2'-O-methyluridine-3'-phosphate
  modified_base 18: mod_base = OTHER; note = 2'-O-methylguanosine-3'-phosphate
  modified_base 19: mod_base = OTHER; note = 2'-O-methylcytidine-3'-phosphate
  modified_base 20: mod_base = OTHER; note = 2'-O-methyladenosine-3'-phosphate
  modified_base 21: mod_base = OTHER; note = 2'-O-methyladenosine
cagagaaaagcaaaactgcaa

SEQ ID NO: 4523 - RNA, 21 nt, synthetic construct
  source 1..21: mol_type = other RNA
  modified_base 1: mod_base = OTHER; note = 2'-O-methyladenosine-3'-phosphate
  modified_base 2: mod_base = OTHER; note = 2'-O-methylguanosine-3'-phosphate
  modified_base 3: mod_base = OTHER; note = 2'-O-methyladenosine-3'-phosphate
  modified_base 4: mod_base = OTHER; note = 2'-O-methylguanosine-3'-phosphate
  modified_base 5: mod_base = OTHER; note = 2'-O-methyladenosine-3'-phosphate
  modified_base 6: mod_base = OTHER; note = 2'-O-methyladenosine-3'-phosphate
  modified_base 7: mod_base = OTHER; note = 2'-deoxy-2'-fluoroadenosine-3'-phosphate
  modified_base 8: mod_base = OTHER; note = 2'-O-methyladenosine-3'-phosphate
  modified_base 9: mod_base = OTHER; note = 2'-deoxy-2'-fluoroguanosine-3'-phosphate
  modified_base 10: mod_base = OTHER; note = 2'-deoxy-2'-fluorocytidine-3'-phosphate
  modified_base 11: mod_base = OTHER; note = 2'-deoxy-2'-fluoroadenosine-3'-phosphate
  modified_base 12: mod_base = OTHER; note = 2'-O-methyladenosine-3'-phosphate
  modified_base 13: mod_base = OTHER; note = 2'-O-methyladenosine-3'-phosphate
  modified_base 14: mod_base = OTHER; note = 2'-O-methyladenosine-3'-phosphate
  modified_base 15: mod_base = OTHER; note = 2'-O-methylcytidine-3'-phosphate
  modified_base 16: mod_base = OTHER; note = 2'-O-methyluridine-3'-phosphate
  modified_base 17: mod_base = OTHER; note = 2'-O-methylguanosine-3'-phosphate
  modified_base 18: mod_base = OTHER; note = 2'-O-methylcytidine-3'-phosphate
  modified_base 19: mod_base = OTHER; note = 2'-O-methyladenosine-3'-phosphate
  modified_base 20: mod_base = OTHER; note = 2'-O-methyladenosine-3'-phosphate
  modified_base 21: mod_base = OTHER; note = 2'-O-methyladenosine
agagaaaagcaaaactgcaaa

SEQ ID NO: 4524 - RNA, 21 nt, synthetic construct
  source 1..21: mol_type = other RNA
  modified_base 1: mod_base = OTHER; note = 2'-O-methyladenosine-3'-phosphate
  modified_base 2: mod_base = OTHER; note = 2'-O-methylguanosine-3'-phosphate
  modified_base 3: mod_base = OTHER; note = 2'-O-methyladenosine-3'-phosphate
  modified_base 4: mod_base = OTHER; note = 2'-O-methyladenosine-3'-phosphate
  modified_base 5: mod_base = OTHER; note = 2'-O-methyladenosine-3'-phosphate
  modified_base 6: mod_base = OTHER; note = 2'-O-methyladenosine-3'-phosphate
  modified_base 7: mod_base = OTHER; note = 2'-deoxy-2'-fluoroguanosine-3'-phosphate
  modified_base 8: mod_base = OTHER; note = 2'-O-methylcytidine-3'-phosphate
  modified_base 9: mod_base = OTHER; note = 2'-deoxy-2'-fluoroadenosine-3'-phosphate
  modified_base 10: mod_base = OTHER; note = 2'-deoxy-2'-fluoroadenosine-3'-phosphate
  modified_base 11: mod_base = OTHER; note = 2'-deoxy-2'-fluoroadenosine-3'-phosphate
  modified_base 12: mod_base = OTHER; note = 2'-O-methyladenosine-3'-phosphate
  modified_base 13: mod_base = OTHER; note = 2'-O-methylcytidine-3'-phosphate
  modified_base 14: mod_base = OTHER; note = 2'-O-methyluridine-3'-phosphate
  modified_base 15: mod_base = OTHER; note = 2'-O-methylguanosine-3'-phosphate
  modified_base 16: mod_base = OTHER; note = 2'-O-methylcytidine-3'-phosphate
  modified_base 17: mod_base = OTHER; note = 2'-O-methyladenosine-3'-phosphate
  modified_base 18: mod_base = OTHER; note = 2'-O-methyladenosine-3'-phosphate
  modified_base 19: mod_base = OTHER; note = 2'-O-methylguanosine-3'-phosphate
  modified_base 20: mod_base = OTHER; note = 2'-O-methyluridine-3'-phosphate
  modified_base 21: mod_base = OTHER; note = 2'-O-methyladenosine
agaaaagcaaaactgcaagta

SEQ ID NO: 4525 - RNA, 21 nt, synthetic construct
  source 1..21: mol_type = other RNA
  modified_base 1: mod_base = OTHER; note = 2'-O-methyladenosine-3'-phosphate
  modified_base 2: mod_base = OTHER; note = 2'-O-methyladenosine-3'-phosphate
  modified_base 3: mod_base = OTHER; note = 2'-O-methyladenosine-3'-phosphate
  modified_base 4: mod_base = OTHER; note = 2'-O-methyladenosine-3'-phosphate
  modified_base 5: mod_base = OTHER; note = 2'-O-methylguanosine-3'-phosphate
  modified_base 6: mod_base = OTHER; note = 2'-O-methylcytidine-3'-phosphate
  modified_base 7: mod_base = OTHER; note = 2'-deoxy-2'-fluoroadenosine-3'-phosphate
  modified_base 8: mod_base = OTHER; note = 2'-O-methyladenosine-3'-phosphate
  modified_base 9: mod_base = OTHER; note = 2'-deoxy-2'-fluoroadenosine-3'-phosphate
  modified_base 10: mod_base = OTHER; note = 2'-deoxy-2'-fluoroadenosine-3'-phosphate
  modified_base 11: mod_base = OTHER; note = 2'-deoxy-2'-fluorocytidine-3'-phosphate
  modified_base 12: mod_base = OTHER; note = 2'-O-methyluridine-3'-phosphate
  modified_base 13: mod_base = OTHER; note = 2'-O-methylguanosine-3'-phosphate
  modified_base 14: mod_base = OTHER; note = 2'-O-methylcytidine-3'-phosphate
  modified_base 15: mod_base = OTHER; note = 2'-O-methyladenosine-3'-phosphate
  modified_base 16: mod_base = OTHER; note = 2'-O-methyladenosine-3'-phosphate
  modified_base 17: mod_base = OTHER; note = 2'-O-methylguanosine-3'-phosphate
  modified_base 18: mod_base = OTHER; note = 2'-O-methyluridine-3'-phosphate
  modified_base 19: mod_base = OTHER; note = 2'-O-methylguanosine-3'-phosphate
  modified_base 20: mod_base = OTHER; note = 2'-O-methyladenosine-3'-phosphate
  modified_base 21: mod_base = OTHER; note = 2'-O-methyladenosine
aaaagcaaaactgcaagtgaa

SEQ ID NO: 4526 - RNA, 21 nt, synthetic construct
  source 1..21: mol_type = other RNA
  modified_base 1: mod_base = OTHER; note = 2'-O-methyladenosine-3'-phosphate
  modified_base 2: mod_base = OTHER; note = 2'-O-methyladenosine-3'-phosphate
  modified_base 3: mod_base = OTHER; note = 2'-O-methyladenosine-3'-phosphate
  modified_base 4: mod_base = OTHER; note = 2'-O-methylguanosine-3'-phosphate
  modified_base 5: mod_base = OTHER; note = 2'-O-methylcytidine-3'-phosphate
  modified_base 6: mod_base = OTHER; note = 2'-O-methyladenosine-3'-phosphate
  modified_base 7: mod_base = OTHER; note = 2'-deoxy-2'-fluoroadenosine-3'-phosphate
  modified_base 8: mod_base = OTHER; note = 2'-O-methyladenosine-3'-phosphate
  modified_base 9: mod_base = OTHER; note = 2'-deoxy-2'-fluoroadenosine-3'-phosphate
  modified_base 10: mod_base = OTHER; note = 2'-deoxy-2'-fluorocytidine-3'-phosphate
  modified_base 11: mod_base = OTHER; note = 2'-deoxy-2'-fluorouridine-3'-phosphate
  modified_base 12: mod_base = OTHER; note = 2'-O-methylguanosine-3'-phosphate
  modified_base 13: mod_base = OTHER; note = 2'-O-methylcytidine-3'-phosphate
  modified_base 14: mod_base = OTHER; note = 2'-O-methyladenosine-3'-phosphate
  modified_base 15: mod_base = OTHER; note = 2'-O-methyladenosine-3'-phosphate
  modified_base 16: mod_base = OTHER; note = 2'-O-methylguanosine-3'-phosphate
  modified_base 17: mod_base = OTHER; note = 2'-O-methyluridine-3'-phosphate
  modified_base 18: mod_base = OTHER; note = 2'-O-methylguanosine-3'-phosphate
  modified_base 19: mod_base = OTHER; note = 2'-O-methyladenosine-3'-phosphate
  modified_base 20: mod_base = OTHER; note = 2'-O-methylcytidine-3'-phosphate
  modified_base 21: mod_base = OTHER; note = 2'-O-methyladenosine
aaagcaaaactgcaagtgaca

SEQ ID NO: 4527 - RNA, 21 nt, synthetic construct
  source 1..21: mol_type = other RNA
  modified_base 1: mod_base = OTHER; note = 2'-O-methyladenosine-3'-phosphate
  modified_base 2: mod_base = OTHER; note = 2'-O-methyladenosine-3'-phosphate
  modified_base 3: mod_base = OTHER; note = 2'-O-methylguanosine-3'-phosphate
  modified_base 4: mod_base = OTHER; note = 2'-O-methylcytidine-3'-phosphate
  modified_base 5: mod_base = OTHER; note = 2'-O-methyladenosine-3'-phosphate
  modified_base 6: mod_base = OTHER; note = 2'-O-methyladenosine-3'-phosphate
  modified_base 7: mod_base = OTHER; note = 2'-deoxy-2'-fluoroadenosine-3'-phosphate
  modified_base 8: mod_base = OTHER; note = 2'-O-methyladenosine-3'-phosphate
  modified_base 9: mod_base = OTHER; note = 2'-deoxy-2'-fluorocytidine-3'-phosphate
  modified_base 10: mod_base = OTHER; note = 2'-deoxy-2'-fluorouridine-3'-phosphate
  modified_base 11: mod_base = OTHER; note = 2'-deoxy-2'-fluoroguanosine-3'-phosphate
  modified_base 12: mod_base = OTHER; note = 2'-O-methylcytidine-3'-phosphate
  modified_base 13: mod_base = OTHER; note = 2'-O-methyladenosine-3'-phosphate
  modified_base 14: mod_base = OTHER; note = 2'-O-methyladenosine-3'-phosphate
  modified_base 15: mod_base = OTHER; note = 2'-O-methylguanosine-3'-phosphate
  modified_base 16: mod_base = OTHER; note = 2'-O-methyluridine-3'-phosphate
  modified_base 17: mod_base = OTHER; note = 2'-O-methylguanosine-3'-phosphate
  modified_base 18: mod_base = OTHER; note = 2'-O-methyladenosine-3'-phosphate
  modified_base 19: mod_base = OTHER; note = 2'-O-methylcytidine-3'-phosphate
  modified_base 20: mod_base = OTHER; note = 2'-O-methyluridine-3'-phosphate
  modified_base 21: mod_base = OTHER; note = 2'-O-methyladenosine
aagcaaaactgcaagtgacta

SEQ ID NO: 4528 - RNA, 21 nt, synthetic construct
  source 1..21: mol_type = other RNA
  modified_base 1: mod_base = OTHER; note = 2'-O-methyladenosine-3'-phosphate
  modified_base 2: mod_base = OTHER; note = 2'-O-methyladenosine-3'-phosphate
  modified_base 3: mod_base = OTHER; note = 2'-O-methyladenosine-3'-phosphate
  modified_base 4: mod_base = OTHER; note = 2'-O-methylcytidine-3'-phosphate
  modified_base 5: mod_base = OTHER; note = 2'-O-methyluridine-3'-phosphate
  modified_base 6: mod_base = OTHER; note = 2'-O-methylguanosine-3'-phosphate
  modified_base 7: mod_base = OTHER; note = 2'-deoxy-2'-fluorocytidine-3'-phosphate
  modified_base 8: mod_base = OTHER; note = 2'-O-methyladenosine-3'-phosphate
  modified_base 9: mod_base = OTHER; note = 2'-deoxy-2'-fluoroadenosine-3'-phosphate
  modified_base 10: mod_base = OTHER; note = 2'-deoxy-2'-fluoroguanosine-3'-phosphate
  modified_base 11: mod_base = OTHER; note = 2'-deoxy-2'-fluorouridine-3'-phosphate
  modified_base 12: mod_base = OTHER; note = 2'-O-methylguanosine-3'-phosphate
  modified_base 13: mod_base = OTHER; note = 2'-O-methyladenosine-3'-phosphate
  modified_base 14: mod_base = OTHER; note = 2'-O-methylcytidine-3'-phosphate
  modified_base 15: mod_base = OTHER; note = 2'-O-methyluridine-3'-phosphate
  modified_base 16: mod_base = OTHER; note = 2'-O-methylguanosine-3'-phosphate
  modified_base 17: mod_base = OTHER; note = 2'-O-methyluridine-3'-phosphate
  modified_base 18: mod_base = OTHER; note = 2'-O-methylguanosine-3'-phosphate
  modified_base 19: mod_base = OTHER; note = 2'-O-methyladenosine-3'-phosphate
  modified_base 20: mod_base = OTHER; note = 2'-O-methyladenosine-3'-phosphate
  modified_base 21: mod_base = OTHER; note = 2'-O-methyladenosine
aaactgcaagtgactgtgaaa

SEQ ID NO: 4529 - RNA, 21 nt, synthetic construct
  source 1..21: mol_type = other RNA
  modified_base 1: mod_base = OTHER; note = 2'-O-methyladenosine-3'-phosphate
  modified_base 2: mod_base = OTHER; note = 2'-O-methyladenosine-3'-phosphate
  modified_base 3: mod_base = OTHER; note = 2'-O-methylcytidine-3'-phosphate
  modified_base 4: mod_base = OTHER; note = 2'-O-methyluridine-3'-phosphate
  modified_base 5: mod_base = OTHER; note = 2'-O-methylguanosine-3'-phosphate
  modified_base 6: mod_base = OTHER; note = 2'-O-methylcytidine-3'-phosphate
  modified_base 7: mod_base = OTHER; note = 2'-deoxy-2'-fluoroadenosine-3'-phosphate
  modified_base 8: mod_base = OTHER; note = 2'-O-methyladenosine-3'-phosphate
  modified_base 9: mod_base = OTHER; note = 2'-deoxy-2'-fluoroguanosine-3'-phosphate
  modified_base 10: mod_base = OTHER; note = 2'-deoxy-2'-fluorouridine-3'-phosphate
  modified_base 11: mod_base = OTHER; note = 2'-deoxy-2'-fluoroguanosine-3'-phosphate
  modified_base 12: mod_base = OTHER; note = 2'-O-methyladenosine-3'-phosphate
  modified_base 13: mod_base = OTHER; note = 2'-O-methylcytidine-3'-phosphate
  modified_base 14: mod_base = OTHER; note = 2'-O-methyluridine-3'-phosphate
  modified_base 15: mod_base = OTHER; note = 2'-O-methylguanosine-3'-phosphate
  modified_base 16: mod_base = OTHER; note = 2'-O-methyluridine-3'-phosphate
  modified_base 17: mod_base = OTHER; note = 2'-O-methylguanosine-3'-phosphate
  modified_base 18: mod_base = OTHER; note = 2'-O-methyladenosine-3'-phosphate
  modified_base 19: mod_base = OTHER; note = 2'-O-methyladenosine-3'-phosphate
  modified_base 20: mod_base = OTHER; note = 2'-O-methyluridine-3'-phosphate
  modified_base 21: mod_base = OTHER; note = 2'-O-methyladenosine
aactgcaagtgactgtgaata

SEQ ID NO: 4530 - RNA, 21 nt, synthetic construct
  source 1..21: mol_type = other RNA
  modified_base 1: mod_base = OTHER; note = 2'-O-methyladenosine-3'-phosphate
  modified_base 2: mod_base = OTHER; note = 2'-O-methylcytidine-3'-phosphate
  modified_base 3: mod_base = OTHER; note = 2'-O-methyluridine-3'-phosphate
  modified_base 4: mod_base = OTHER; note = 2'-O-methylguanosine-3'-phosphate
  modified_base 5: mod_base = OTHER; note = 2'-O-methylcytidine-3'-phosphate
  modified_base 6: mod_base = OTHER; note = 2'-O-methyladenosine-3'-phosphate
  modified_base 7: mod_base = OTHER; note = 2'-deoxy-2'-fluoroadenosine-3'-phosphate
  modified_base 8: mod_base = OTHER; note = 2'-O-methylguanosine-3'-phosphate
  modified_base 9: mod_base = OTHER; note = 2'-deoxy-2'-fluorouridine-3'-phosphate
  modified_base 10: mod_base = OTHER; note = 2'-deoxy-2'-fluoroguanosine-3'-phosphate
  modified_base 11: mod_base = OTHER; note = 2'-deoxy-2'-fluoroadenosine-3'-phosphate
  modified_base 12: mod_base = OTHER; note = 2'-O-methylcytidine-3'-phosphate
  modified_base 13: mod_base = OTHER; note = 2'-O-methyluridine-3'-phosphate
  modified_base 14: mod_base = OTHER; note = 2'-O-methylguanosine-3'-phosphate
  modified_base 15: mod_base = OTHER; note = 2'-O-methyluridine-3'-phosphate
  modified_base 16: mod_base = OTHER; note = 2'-O-methylguanosine-3'-phosphate
  modified_base 17: mod_base = OTHER; note = 2'-O-methyladenosine-3'-phosphate
  modified_base 18: mod_base = OTHER; note = 2'-O-methyladenosine-3'-phosphate
  modified_base 19: mod_base = OTHER; note = 2'-O-methyluridine-3'-phosphate
  modified_base 20: mod_base = OTHER; note = 2'-O-methyladenosine-3'-phosphate
  modified_base 21: mod_base = OTHER; note = 2'-O-methyladenosine
actgcaagtgactgtgaataa

SEQ ID NO: 4531 - RNA, 21 nt, synthetic construct
  source 1..21: mol_type = other RNA
  modified_base 1: mod_base = OTHER; note = 2'-O-methylcytidine-3'-phosphate
  modified_base 2: mod_base = OTHER; note = 2'-O-methyluridine-3'-phosphate
  modified_base 3: mod_base = OTHER; note = 2'-O-methylguanosine-3'-phosphate
  modified_base 4: mod_base = OTHER; note = 2'-O-methylcytidine-3'-phosphate
  modified_base 5: mod_base = OTHER; note = 2'-O-methyladenosine-3'-phosphate
  modified_base 6: mod_base = OTHER; note = 2'-O-methyladenosine-3'-phosphate
  modified_base 7: mod_base = OTHER; note = 2'-deoxy-2'-fluoroguanosine-3'-phosphate
  modified_base 8: mod_base = OTHER; note = 2'-O-methyluridine-3'-phosphate
  modified_base 9: mod_base = OTHER; note = 2'-deoxy-2'-fluoroguanosine-3'-phosphate
  modified_base 10: mod_base = OTHER; note = 2'-deoxy-2'-fluoroadenosine-3'-phosphate
  modified_base 11: mod_base = OTHER; note = 2'-deoxy-2'-fluorocytidine-3'-phosphate
  modified_base 12: mod_base = OTHER; note = 2'-O-methyluridine-3'-phosphate
  modified_base 13: mod_base = OTHER; note = 2'-O-methylguanosine-3'-phosphate
  modified_base 14: mod_base = OTHER; note = 2'-O-methyluridine-3'-phosphate
  modified_base 15: mod_base = OTHER; note = 2'-O-methylguanosine-3'-phosphate
  modified_base 16: mod_base = OTHER; note = 2'-O-methyladenosine-3'-phosphate
  modified_base 17: mod_base = OTHER; note = 2'-O-methyladenosine-3'-phosphate
  modified_base 18: mod_base = OTHER; note = 2'-O-methyluridine-3'-phosphate
  modified_base 19: mod_base = OTHER; note = 2'-O-methyladenosine-3'-phosphate
  modified_base 20: mod_base = OTHER; note = 2'-O-methyladenosine-3'-phosphate
  modified_base 21: mod_base = OTHER; note = 2'-O-methyladenosine
ctgcaagtgactgtgaataaa

SEQ ID NO: 4532 - RNA, 21 nt, synthetic construct
  source 1..21: mol_type = other RNA
  modified_base 1: mod_base = OTHER; note = 2'-O-methyluridine-3'-phosphate
  modified_base 2: mod_base = OTHER; note = 2'-O-methylguanosine-3'-phosphate
  modified_base 3: mod_base = OTHER; note = 2'-O-methylcytidine-3'-phosphate
  modified_base 4: mod_base = OTHER; note = 2'-O-methyladenosine-3'-phosphate
  modified_base 5: mod_base = OTHER; note = 2'-O-methyladenosine-3'-phosphate
  modified_base 6: mod_base = OTHER; note = 2'-O-methylguanosine-3'-phosphate
  modified_base 7: mod_base = OTHER; note = 2'-deoxy-2'-fluorouridine-3'-phosphate
  modified_base 8: mod_base = OTHER; note = 2'-O-methylguanosine-3'-phosphate
  modified_base 9: mod_base = OTHER; note = 2'-deoxy-2'-fluoroadenosine-3'-phosphate
  modified_base 10: mod_base = OTHER; note = 2'-deoxy-2'-fluorocytidine-3'-phosphate
  modified_base 11: mod_base = OTHER; note = 2'-deoxy-2'-fluorouridine-3'-phosphate
  modified_base 12: mod_base = OTHER; note = 2'-O-methylguanosine-3'-phosphate
  modified_base 13: mod_base = OTHER; note = 2'-O-methyluridine-3'-phosphate
  modified_base 14: mod_base = OTHER; note = 2'-O-methylguanosine-3'-phosphate
  modified_base 15: mod_base = OTHER; note = 2'-O-methyladenosine-3'-phosphate
  modified_base 16: mod_base = OTHER; note = 2'-O-methyladenosine-3'-phosphate
  modified_base 17: mod_base = OTHER; note = 2'-O-methyluridine-3'-phosphate
  modified_base 18: mod_base = OTHER; note = 2'-O-methyladenosine-3'-phosphate
  modified_base 19: mod_base = OTHER; note = 2'-O-methyladenosine-3'-phosphate
  modified_base 20: mod_base = OTHER; note = 2'-O-methyladenosine-3'-phosphate
  modified_base 21: mod_base = OTHER; note = 2'-O-methyladenosine
tgcaagtgactgtgaataaaa

SEQ ID NO: 4533 - RNA, 21 nt, synthetic construct
  source 1..21: mol_type = other RNA
  modified_base 1: mod_base = OTHER; note = 2'-O-methylguanosine-3'-phosphate
  modified_base 2: mod_base = OTHER; note = 2'-O-methylcytidine-3'-phosphate
  modified_base 3: mod_base = OTHER; note = 2'-O-methyladenosine-3'-phosphate
  modified_base 4: mod_base = OTHER; note = 2'-O-methyladenosine-3'-phosphate
  modified_base 5: mod_base = OTHER; note = 2'-O-methylguanosine-3'-phosphate
  modified_base 6: mod_base = OTHER; note = 2'-O-methyluridine-3'-phosphate
  modified_base 7: mod_base = OTHER; note = 2'-deoxy-2'-fluoroguanosine-3'-phosphate
  modified_base 8: mod_base = OTHER; note = 2'-O-methyladenosine-3'-phosphate
  modified_base 9: mod_base = OTHER; note = 2'-deoxy-2'-fluorocytidine-3'-phosphate
  modified_base 10: mod_base = OTHER; note = 2'-deoxy-2'-fluorouridine-3'-phosphate
  modified_base 11: mod_base = OTHER; note = 2'-deoxy-2'-fluoroguanosine-3'-phosphate
  modified_base 12: mod_base = OTHER; note = 2'-O-methyluridine-3'-phosphate
  modified_base 13: mod_base = OTHER; note = 2'-O-methylguanosine-3'-phosphate
  modified_base 14: mod_base = OTHER; note = 2'-O-methyladenosine-3'-phosphate
  modified_base 15: mod_base = OTHER; note = 2'-O-methyladenosine-3'-phosphate
  modified_base 16: mod_base = OTHER; note = 2'-O-methyluridine-3'-phosphate
  modified_base 17: mod_base = OTHER; note = 2'-O-methyladenosine-3'-phosphate
  modified_base 18: mod_base = OTHER; note = 2'-O-methyladenosine-3'-phosphate
  modified_base 19: mod_base = OTHER; note = 2'-O-methyladenosine-3'-phosphate
  modified_base 20: mod_base = OTHER; note = 2'-O-methylguanosine-3'-phosphate
  modified_base 21: mod_base = OTHER; note = 2'-O-methyladenosine
gcaagtgactgtgaataaaga

SEQ ID NO: 4534 - RNA, 21 nt, synthetic construct
  source 1..21: mol_type = other RNA
  modified_base 1: mod_base = OTHER; note = 2'-O-methylcytidine-3'-phosphate
  modified_base 2: mod_base = OTHER; note = 2'-O-methyladenosine-3'-phosphate
  modified_base 3: mod_base = OTHER; note = 2'-O-methyladenosine-3'-phosphate
  modified_base 4: mod_base = OTHER; note = 2'-O-methylguanosine-3'-phosphate
  modified_base 5: mod_base = OTHER; note = 2'-O-methyluridine-3'-phosphate
  modified_base 6: mod_base = OTHER; note = 2'-O-methylguanosine-3'-phosphate
  modified_base 7: mod_base = OTHER; note = 2'-deoxy-2'-fluoroadenosine-3'-phosphate
  modified_base 8: mod_base = OTHER; note = 2'-O-methylcytidine-3'-phosphate
  modified_base 9: mod_base = OTHER; note = 2'-deoxy-2'-fluorouridine-3'-phosphate
  modified_base 10: mod_base = OTHER; note = 2'-deoxy-2'-fluoroguanosine-3'-phosphate
  modified_base 11: mod_base = OTHER; note = 2'-deoxy-2'-fluorouridine-3'-phosphate
  modified_base 12: mod_base = OTHER; note = 2'-O-methylguanosine-3'-phosphate
  modified_base 13: mod_base = OTHER; note = 2'-O-methyladenosine-3'-phosphate
  modified_base 14: mod_base = OTHER; note = 2'-O-methyladenosine-3'-phosphate
  modified_base 15: mod_base = OTHER; note = 2'-O-methyluridine-3'-phosphate
  modified_base 16: mod_base = OTHER; note = 2'-O-methyladenosine-3'-phosphate
  modified_base 17: mod_base = OTHER; note = 2'-O-methyladenosine-3'-phosphate
  modified_base 18: mod_base = OTHER; note = 2'-O-methyladenosine-3'-phosphate
  modified_base 19: mod_base = OTHER; note = 2'-O-methylguanosine-3'-phosphate
  modified_base 20: mod_base = OTHER; note = 2'-O-methylguanosine-3'-phosphate
  modified_base 21: mod_base = OTHER; note = 2'-O-methyladenosine
caagtgactgtgaataaagga

SEQ ID NO: 4535 - RNA, 21 nt, synthetic construct
  source 1..21: mol_type = other RNA
  modified_base 1: mod_base = OTHER; note = 2'-O-methylguanosine-3'-phosphate
  modified_base 2: mod_base = OTHER; note = 2'-O-methyladenosine-3'-phosphate
  modified_base 3: mod_base = OTHER; note = 2'-O-methylcytidine-3'-phosphate
  modified_base 4: mod_base = OTHER; note = 2'-O-methyluridine-3'-phosphate
  modified_base 5: mod_base = OTHER; note = 2'-O-methylguanosine-3'-phosphate
  modified_base 6: mod_base = OTHER; note = 2'-O-methyluridine-3'-phosphate
  modified_base 7: mod_base = OTHER; note = 2'-deoxy-2'-fluoroguanosine-3'-phosphate
  modified_base 8: mod_base = OTHER; note = 2'-O-methyladenosine-3'-phosphate
  modified_base 9: mod_base = OTHER; note = 2'-deoxy-2'-fluoroadenosine-3'-phosphate
  modified_base 10: mod_base = OTHER; note = 2'-deoxy-2'-fluorouridine-3'-phosphate
  modified_base 11: mod_base = OTHER; note = 2'-deoxy-2'-fluoroadenosine-3'-phosphate
  modified_base 12: mod_base = OTHER; note = 2'-O-methyladenosine-3'-phosphate
  modified_base 13: mod_base = OTHER; note = 2'-O-methyladenosine-3'-phosphate
  modified_base 14: mod_base = OTHER; note = 2'-O-methylguanosine-3'-phosphate
  modified_base 15: mod_base = OTHER; note = 2'-O-methylguanosine-3'-phosphate
  modified_base 16: mod_base = OTHER; note = 2'-O-methylguanosine-3'-phosphate
  modified_base 17: mod_base = OTHER; note = 2'-O-methyluridine-3'-phosphate
  modified_base 18: mod_base = OTHER; note = 2'-O-methylguanosine-3'-phosphate
  modified_base 19: mod_base = OTHER; note = 2'-O-methyladenosine-3'-phosphate
  modified_base 20: mod_base = OTHER; note = 2'-O-methyladenosine-3'-phosphate
  modified_base 21: mod_base = OTHER; note = 2'-O-methyladenosine
gactgtgaataaagggtgaaa

SEQ ID NO: 4536 - RNA, 21 nt, synthetic construct
  source 1..21: mol_type = other RNA
  modified_base 1: mod_base = OTHER; note = 2'-O-methyladenosine-3'-phosphate
  modified_base 2: mod_base = OTHER; note = 2'-O-methylcytidine-3'-phosphate
  modified_base 3: mod_base = OTHER; note = 2'-O-methyluridine-3'-phosphate
  modified_base 4: mod_base = OTHER; note = 2'-O-methylguanosine-3'-phosphate
  modified_base 5: mod_base = OTHER; note = 2'-O-methyluridine-3'-phosphate
  modified_base 6: mod_base = OTHER; note = 2'-O-methylguanosine-3'-phosphate
  modified_base 7: mod_base = OTHER; note = 2'-deoxy-2'-fluoroadenosine-3'-phosphate
  modified_base 8: mod_base = OTHER; note = 2'-O-methyladenosine-3'-phosphate
  modified_base 9: mod_base = OTHER; note = 2'-deoxy-2'-fluorouridine-3'-phosphate
  modified_base 10: mod_base = OTHER; note = 2'-deoxy-2'-fluoroadenosine-3'-phosphate
  modified_base 11: mod_base = OTHER; note = 2'-deoxy-2'-fluoroadenosine-3'-phosphate
  modified_base 12: mod_base = OTHER; note = 2'-O-methyladenosine-3'-phosphate
  modified_base 13: mod_base = OTHER; note = 2'-O-methylguanosine-3'-phosphate
  modified_base 14: mod_base = OTHER; note = 2'-O-methylguanosine-3'-phosphate
  modified_base 15: mod_base = OTHER; note = 2'-O-methylguanosine-3'-phosphate
  modified_base 16: mod_base = OTHER; note = 2'-O-methyluridine-3'-phosphate
  modified_base 17: mod_base = OTHER; note = 2'-O-methylguanosine-3'-phosphate
  modified_base 18: mod_base = OTHER; note = 2'-O-methyladenosine-3'-phosphate
  modified_base 19: mod_base = OTHER; note = 2'-O-methyladenosine-3'-phosphate
  modified_base 20: mod_base = OTHER; note = 2'-O-methyluridine-3'-phosphate
  modified_base 21: mod_base = OTHER; note = 2'-O-methyladenosine
actgtgaataaagggtgaata

SEQ ID NO: 4537 - RNA, 21 nt, synthetic construct
  source 1..21: mol_type = other RNA
  modified_base 1: mod_base = OTHER; note = 2'-O-methylguanosine-3'-phosphate
  modified_base 2: mod_base = OTHER; note = 2'-O-methyluridine-3'-phosphate
  modified_base 3: mod_base = OTHER; note = 2'-O-methylguanosine-3'-phosphate
  modified_base 4: mod_base = OTHER; note = 2'-O-methyladenosine-3'-phosphate
  modified_base 5: mod_base = OTHER; note = 2'-O-methyladenosine-3'-phosphate
  modified_base 6: mod_base = OTHER; note = 2'-O-methyluridine-3'-phosphate
  modified_base 7: mod_base = OTHER; note = 2'-deoxy-2'-fluoroadenosine-3'-phosphate
  modified_base 8: mod_base = OTHER; note = 2'-O-methyladenosine-3'-phosphate
  modified_base 9: mod_base = OTHER; note = 2'-deoxy-2'-fluoroadenosine-3'-phosphate
  modified_base 10: mod_base = OTHER; note = 2'-deoxy-2'-fluoroguanosine-3'-phosphate
  modified_base 11: mod_base = OTHER; note = 2'-deoxy-2'-fluoroguanosine-3'-phosphate
  modified_base 12: mod_base = OTHER; note = 2'-O-methylguanosine-3'-phosphate
  modified_base 13: mod_base = OTHER; note = 2'-O-methyluridine-3'-phosphate
  modified_base 14: mod_base = OTHER; note = 2'-O-methylguanosine-3'-phosphate
  modified_base 15: mod_base = OTHER; note = 2'-O-methyladenosine-3'-phosphate
  modified_base 16: mod_base = OTHER; note = 2'-O-methyladenosine-3'-phosphate
  modified_base 17: mod_base = OTHER; note = 2'-O-methyluridine-3'-phosphate
  modified_base 18: mod_base = OTHER; note = 2'-O-methylguanosine-3'-phosphate
  modified_base 19: mod_base = OTHER; note = 2'-O-methyluridine-3'-phosphate
  modified_base 20: mod_base = OTHER; note = 2'-O-methyladenosine-3'-phosphate
  modified_base 21: mod_base = OTHER; note = 2'-O-methyladenosine
gtgaataaagggtgaatgtaa

SEQ ID NO: 4538 - RNA, 21 nt, synthetic construct
  source 1..21: mol_type = other RNA
  modified_base 1: mod_base = OTHER; note = 2'-O-methyluridine-3'-phosphate
  modified_base 2: mod_base = OTHER; note = 2'-O-methylguanosine-3'-phosphate
  modified_base 3: mod_base = OTHER; note = 2'-O-methyladenosine-3'-phosphate
  modified_base 4: mod_base = OTHER; note = 2'-O-methyladenosine-3'-phosphate
  modified_base 5: mod_base = OTHER; note = 2'-O-methyluridine-3'-phosphate
  modified_base 6: mod_base = OTHER; note = 2'-O-methyladenosine-3'-phosphate
  modified_base 7: mod_base = OTHER; note = 2'-deoxy-2'-fluoroadenosine-3'-phosphate
  modified_base 8: mod_base = OTHER; note = 2'-O-methyladenosine-3'-phosphate
  modified_base 9: mod_base = OTHER; note = 2'-deoxy-2'-fluoroguanosine-3'-phosphate
  modified_base 10: mod_base = OTHER; note = 2'-deoxy-2'-fluoroguanosine-3'-phosphate
  modified_base 11: mod_base = OTHER; note = 2'-deoxy-2'-fluoroguanosine-3'-phosphate
  modified_base 12: mod_base = OTHER; note = 2'-O-methyluridine-3'-phosphate
  modified_base 13: mod_base = OTHER; note = 2'-O-methylguanosine-3'-phosphate
  modified_base 14: mod_base = OTHER; note = 2'-O-methyladenosine-3'-phosphate
  modified_base 15: mod_base = OTHER; note = 2'-O-methyladenosine-3'-phosphate
  modified_base 16: mod_base = OTHER; note = 2'-O-methyluridine-3'-phosphate
  modified_base 17: mod_base = OTHER; note = 2'-O-methylguanosine-3'-phosphate
  modified_base 18: mod_base = OTHER; note = 2'-O-methyluridine-3'-phosphate
  modified_base 19: mod_base = OTHER; note = 2'-O-methyladenosine-3'-phosphate
  modified_base 20: mod_base = OTHER; note = 2'-O-methylguanosine-3'-phosphate
  modified_base 21: mod_base = OTHER; note = 2'-O-methyladenosine
tgaataaagggtgaatgtaga

SEQ ID NO: 4539 - RNA, 21 nt, synthetic construct
  source 1..21: mol_type = other RNA
  modified_base 1: mod_base = OTHER; note = 2'-O-methylguanosine-3'-phosphate
  modified_base 2: mod_base = OTHER; note = 2'-O-methyladenosine-3'-phosphate
  modified_base 3: mod_base = OTHER; note = 2'-O-methyladenosine-3'-phosphate
  modified_base 4: mod_base = OTHER; note = 2'-O-methyluridine-3'-phosphate
  modified_base 5: mod_base = OTHER; note = 2'-O-methyladenosine-3'-phosphate
  modified_base 6: mod_base = OTHER; note = 2'-O-methyladenosine-3'-phosphate
  modified_base 7: mod_base = OTHER; note = 2'-deoxy-2'-fluoroadenosine-3'-phosphate
  modified_base 8: mod_base = OTHER; note = 2'-O-methylguanosine-3'-phosphate
  modified_base 9: mod_base = OTHER; note = 2'-deoxy-2'-fluoroguanosine-3'-phosphate
  modified_base 10: mod_base = OTHER; note = 2'-deoxy-2'-fluoroguanosine-3'-phosphate
  modified_base 11: mod_base = OTHER; note = 2'-deoxy-2'-fluorouridine-3'-phosphate
  modified_base 12: mod_base = OTHER; note = 2'-O-methylguanosine-3'-phosphate
  modified_base 13: mod_base = OTHER; note = 2'-O-methyladenosine-3'-phosphate
  modified_base 14: mod_base = OTHER; note = 2'-O-methyladenosine-3'-phosphate
  modified_base 15: mod_base = OTHER; note = 2'-O-methyluridine-3'-phosphate
  modified_base 16: mod_base = OTHER; note = 2'-O-methylguanosine-3'-phosphate
  modified_base 17: mod_base = OTHER; note = 2'-O-methyluridine-3'-phosphate
  modified_base 18: mod_base = OTHER; note = 2'-O-methyladenosine-3'-phosphate
  modified_base 19: mod_base = OTHER; note = 2'-O-methylguanosine-3'-phosphate
  modified_base 20: mod_base = OTHER; note = 2'-O-methyluridine-3'-phosphate
  modified_base 21: mod_base = OTHER; note = 2'-O-methyladenosine
gaataaagggtgaatgtagta

SEQ ID NO: 4540 - RNA, 21 nt, synthetic construct
  source 1..21: mol_type = other RNA
  modified_base 1: mod_base = OTHER; note = 2'-O-methyluridine-3'-phosphate
  modified_base 2: mod_base = OTHER; note = 2'-O-methyladenosine-3'-phosphate
  modified_base 3: mod_base = OTHER; note = 2'-O-methyladenosine-3'-phosphate
  modified_base 4: mod_base = OTHER; note = 2'-O-methyladenosine-3'-phosphate
  modified_base 5: mod_base = OTHER; note = 2'-O-methylguanosine-3'-phosphate
  modified_base 6: mod_base = OTHER; note = 2'-O-methylguanosine-3'-phosphate
  modified_base 7: mod_base = OTHER; note = 2'-deoxy-2'-fluoroguanosine-3'-phosphate
  modified_base 8: mod_base = OTHER; note = 2'-O-methyluridine-3'-phosphate
  modified_base 9: mod_base = OTHER; note = 2'-deoxy-2'-fluoroguanosine-3'-phosphate
  modified_base 10: mod_base = OTHER; note = 2'-deoxy-2'-fluoroadenosine-3'-phosphate
  modified_base 11: mod_base = OTHER; note = 2'-deoxy-2'-fluoroadenosine-3'-phosphate
  modified_base 12: mod_base = OTHER; note = 2'-O-methyluridine-3'-phosphate
  modified_base 13: mod_base = OTHER; note = 2'-O-methylguanosine-3'-phosphate
  modified_base 14: mod_base = OTHER; note = 2'-O-methyluridine-3'-phosphate
  modified_base 15: mod_base = OTHER; note = 2'-O-methyladenosine-3'-phosphate
  modified_base 16: mod_base = OTHER; note = 2'-O-methylguanosine-3'-phosphate
  modified_base 17: mod_base = OTHER; note = 2'-O-methyluridine-3'-phosphate
  modified_base 18: mod_base = OTHER; note = 2'-O-methylcytidine-3'-phosphate
  modified_base 19: mod_base = OTHER; note = 2'-O-methyluridine-3'-phosphate
  modified_base 20: mod_base = OTHER; note = 2'-O-methylcytidine-3'-phosphate
  modified_base 21: mod_base = OTHER; note = 2'-O-methyladenosine
taaagggtgaatgtagtctca

SEQ ID NO: 4541 - RNA, 21 nt, synthetic construct
  source 1..21: mol_type = other RNA
  modified_base 1: mod_base = OTHER; note = 2'-O-methyladenosine-3'-phosphate
  modified_base 2: mod_base = OTHER; note = 2'-O-methyladenosine-3'-phosphate
  modified_base 3: mod_base = OTHER; note = 2'-O-methylguanosine-3'-phosphate
  modified_base 4: mod_base = OTHER; note = 2'-O-methylguanosine-3'-phosphate
  modified_base 5: mod_base = OTHER; note = 2'-O-methylguanosine-3'-phosphate
  modified_base 6: mod_base = OTHER; note = 2'-O-methyluridine-3'-phosphate
  modified_base 7: mod_base = OTHER; note = 2'-deoxy-2'-fluoroguanosine-3'-phosphate
  modified_base 8: mod_base = OTHER; note = 2'-O-methyladenosine-3'-phosphate
  modified_base 9: mod_base = OTHER; note = 2'-deoxy-2'-fluoroadenosine-3'-phosphate
  modified_base 10: mod_base = OTHER; note = 2'-deoxy-2'-fluorouridine-3'-phosphate
  modified_base 11: mod_base = OTHER; note = 2'-deoxy-2'-fluoroguanosine-3'-phosphate
  modified_base 12: mod_base = OTHER; note = 2'-O-methyluridine-3'-phosphate
  modified_base 13: mod_base = OTHER; note = 2'-O-methyladenosine-3'-phosphate
  modified_base 14: mod_base = OTHER; note = 2'-O-methylguanosine-3'-phosphate
  modified_base 15: mod_base = OTHER; note = 2'-O-methyluridine-3'-phosphate
  modified_base 16: mod_base = OTHER; note = 2'-O-methylcytidine-3'-phosphate
  modified_base 17: mod_base = OTHER; note = 2'-O-methyluridine-3'-phosphate
  modified_base 18: mod_base = OTHER; note = 2'-O-methylcytidine-3'-phosphate
  modified_base 19: mod_base = OTHER; note = 2'-O-methyladenosine-3'-phosphate
  modified_base 20: mod_base = OTHER; note = 2'-O-methyladenosine-3'-phosphate
  modified_base 21: mod_base = OTHER; note = 2'-O-methyladenosine
aagggtgaatgtagtctcaaa

SEQ ID NO: 4542 - RNA, 21 nt, synthetic construct
  source 1..21: mol_type = other RNA
  modified_base 1: mod_base = OTHER; note = 2'-O-methyladenosine-3'-phosphate
  modified_base 2: mod_base = OTHER; note = 2'-O-methylguanosine-3'-phosphate
  modified_base 3: mod_base = OTHER; note = 2'-O-methylguanosine-3'-phosphate
  modified_base 4: mod_base = OTHER; note = 2'-O-methylguanosine-3'-phosphate
  modified_base 5: mod_base = OTHER; note = 2'-O-methyluridine-3'-phosphate
  modified_base 6: mod_base = OTHER; note = 2'-O-methylguanosine-3'-phosphate
  modified_base 7: mod_base = OTHER; note = 2'-deoxy-2'-fluoroadenosine-3'-phosphate
  modified_base 8: mod_base = OTHER; note = 2'-O-methyladenosine-3'-phosphate
  modified_base 9: mod_base = OTHER; note = 2'-deoxy-2'-fluorouridine-3'-phosphate
  modified_base 10: mod_base = OTHER; note = 2'-deoxy-2'-fluoroguanosine-3'-phosphate
  modified_base 11: mod_base = OTHER; note = 2'-deoxy-2'-fluorouridine-3'-phosphate
  modified_base 12: mod_base = OTHER; note = 2'-O-methyladenosine-3'-phosphate
  modified_base 13: mod_base = OTHER; note = 2'-O-methylguanosine-3'-phosphate
  modified_base 14: mod_base = OTHER; note = 2'-O-methyluridine-3'-phosphate
  modified_base 15: mod_base = OTHER; note = 2'-O-methylcytidine-3'-phosphate
  modified_base 16: mod_base = OTHER; note = 2'-O-methyluridine-3'-phosphate
  modified_base 17: mod_base = OTHER; note = 2'-O-methylcytidine-3'-phosphate
  modified_base 18: mod_base = OTHER; note = 2'-O-methyladenosine-3'-phosphate
  modified_base 19: mod_base = OTHER; note = 2'-O-methyladenosine-3'-phosphate
  modified_base 20: mod_base = OTHER; note = 2'-O-methyladenosine-3'-phosphate
  modified_base 21: mod_base = OTHER; note = 2'-O-methyladenosine
agggtgaatgtagtctcaaaa

SEQ ID NO: 4543 - RNA, 21 nt, synthetic construct
  source 1..21: mol_type = other RNA
  modified_base 1: mod_base = OTHER; note = 2'-O-methyladenosine-3'-phosphate
  modified_base 2: mod_base = OTHER; note = 2'-O-methyluridine-3'-phosphate
  modified_base 3: mod_base = OTHER; note = 2'-O-methylcytidine-3'-phosphate
  modified_base 4: mod_base = OTHER; note = 2'-O-methylcytidine-3'-phosphate
  modified_base 5: mod_base = OTHER; note = 2'-O-methyluridine-3'-phosphate
  modified_base 6: mod_base = OTHER; note = 2'-O-methylcytidine-3'-phosphate
  modified_base 7: mod_base = OTHER; note = 2'-deoxy-2'-fluoroadenosine-3'-phosphate
  modified_base 8: mod_base = OTHER; note = 2'-O-methyladenosine-3'-phosphate
  modified_base 9: mod_base = OTHER; note = 2'-deoxy-2'-fluoroadenosine-3'-phosphate
  modified_base 10: mod_base = OTHER; note = 2'-deoxy-2'-fluoroguanosine-3'-phosphate
  modified_base 11: mod_base = OTHER; note = 2'-deoxy-2'-fluoroadenosine-3'-phosphate
  modified_base 12: mod_base = OTHER; note = 2'-O-methylguanosine-3'-phosphate
  modified_base 13: mod_base = OTHER; note = 2'-O-methylcytidine-3'-phosphate
  modified_base 14: mod_base = OTHER; note = 2'-O-methyluridine-3'-phosphate
  modified_base 15: mod_base = OTHER; note = 2'-O-methylguanosine-3'-phosphate
  modified_base 16: mod_base = OTHER; note = 2'-O-methyluridine-3'-phosphate
  modified_base 17: mod_base = OTHER; note = 2'-O-methylguanosine-3'-phosphate
  modified_base 18: mod_base = OTHER; note = 2'-O-methyluridine-3'-phosphate
  modified_base 19: mod_base = OTHER; note = 2'-O-methyluridine-3'-phosphate
  modified_base 20: mod_base = OTHER; note = 2'-O-methyluridine-3'-phosphate
  modified_base 21: mod_base = OTHER; note = 2'-O-methyladenosine
atcctcaaagagctgtgttta

SEQ ID NO: 4544 - RNA, 21 nt, synthetic construct
  source 1..21: mol_type = other RNA
  modified_base 1: mod_base = OTHER; note = 2'-O-methyluridine-3'-phosphate
  modified_base 2: mod_base = OTHER; note = 2'-O-methylcytidine-3'-phosphate
  modified_base 3: mod_base = OTHER; note = 2'-O-methylcytidine-3'-phosphate
  modified_base 4: mod_base = OTHER; note = 2'-O-methyluridine-3'-phosphate
  modified_base 5: mod_base = OTHER; note = 2'-O-methylcytidine-3'-phosphate
  modified_base 6: mod_base = OTHER; note = 2'-O-methyladenosine-3'-phosphate
  modified_base 7: mod_base = OTHER; note = 2'-deoxy-2'-fluoroadenosine-3'-phosphate
  modified_base 8: mod_base = OTHER; note = 2'-O-methyladenosine-3'-phosphate
  modified_base 9: mod_base = OTHER; note = 2'-deoxy-2'-fluoroguanosine-3'-phosphate
  modified_base 10: mod_base = OTHER; note = 2'-deoxy-2'-fluoroadenosine-3'-phosphate
  modified_base 11: mod_base = OTHER; note = 2'-deoxy-2'-fluoroguanosine-3'-phosphate
  modified_base 12: mod_base = OTHER; note = 2'-O-methylcytidine-3'-phosphate
  modified_base 13: mod_base = OTHER; note = 2'-O-methyluridine-3'-phosphate
  modified_base 14: mod_base = OTHER; note = 2'-O-methylguanosine-3'-phosphate
  modified_base 15: mod_base = OTHER; note = 2'-O-methyluridine-3'-phosphate
  modified_base 16: mod_base = OTHER; note = 2'-O-methylguanosine-3'-phosphate
  modified_base 17: mod_base = OTHER; note = 2'-O-methyluridine-3'-phosphate
  modified_base 18: mod_base = OTHER; note = 2'-O-methyluridine-3'-phosphate
  modified_base 19: mod_base = OTHER; note = 2'-O-methyluridine-3'-phosphate
  modified_base 20: mod_base = OTHER; note = 2'-O-methyladenosine-3'-phosphate
  modified_base 21: mod_base = OTHER; note = 2'-O-methyladenosine
tcctcaaagagctgtgtttaa

SEQ ID NO: 4545 - RNA, 21 nt, synthetic construct
  source 1..21: mol_type = other RNA
  modified_base 1: mod_base = OTHER; note = 2'-O-methylcytidine-3'-phosphate
  modified_base 2: mod_base = OTHER; note = 2'-O-methylcytidine-3'-phosphate
  modified_base 3: mod_base = OTHER; note = 2'-O-methyluridine-3'-phosphate
  modified_base 4: mod_base = OTHER; note = 2'-O-methylcytidine-3'-phosphate
  modified_base 5: mod_base = OTHER; note = 2'-O-methyladenosine-3'-phosphate
  modified_base 6: mod_base = OTHER; note = 2'-O-methyladenosine-3'-phosphate
  modified_base 7: mod_base = OTHER; note = 2'-deoxy-2'-fluoroadenosine-3'-phosphate
  modified_base 8: mod_base = OTHER; note = 2'-O-methylguanosine-3'-phosphate
  modified_base 9: mod_base = OTHER; note = 2'-deoxy-2'-fluoroadenosine-3'-phosphate
  modified_base 10: mod_base = OTHER; note = 2'-deoxy-2'-fluoroguanosine-3'-phosphate
  modified_base 11: mod_base = OTHER; note = 2'-deoxy-2'-fluorocytidine-3'-phosphate
  modified_base 12: mod_base = OTHER; note = 2'-O-methyluridine-3'-phosphate
  modified_base 13: mod_base = OTHER; note = 2'-O-methylguanosine-3'-phosphate
  modified_base 14: mod_base = OTHER; note = 2'-O-methyluridine-3'-phosphate
  modified_base 15: mod_base = OTHER; note = 2'-O-methylguanosine-3'-phosphate
  modified_base 16: mod_base = OTHER; note = 2'-O-methyluridine-3'-phosphate
  modified_base 17: mod_base = OTHER; note = 2'-O-methyluridine-3'-phosphate
  modified_base 18: mod_base = OTHER; note = 2'-O-methyluridine-3'-phosphate
  modified_base 19: mod_base = OTHER; note = 2'-O-methyladenosine-3'-phosphate
  modified_base 20: mod_base = OTHER; note = 2'-O-methyluridine-3'-phosphate
  modified_base 21: mod_base = OTHER; note = 2'-O-methyladenosine
cctcaaagagctgtgtttata

SEQ ID NO: 4546 - RNA, 21 nt, synthetic construct
  source 1..21: mol_type = other RNA
  modified_base 1: mod_base = OTHER; note = 2'-O-methylcytidine-3'-phosphate
  modified_base 2: mod_base = OTHER; note = 2'-O-methyluridine-3'-phosphate
  modified_base 3: mod_base = OTHER; note = 2'-O-methylcytidine-3'-phosphate
  modified_base 4: mod_base = OTHER; note = 2'-O-methyladenosine-3'-phosphate
  modified_base 5: mod_base = OTHER; note = 2'-O-methyladenosine-3'-phosphate
  modified_base 6: mod_base = OTHER; note = 2'-O-methyladenosine-3'-phosphate
  modified_base 7: mod_base = OTHER; note = 2'-deoxy-2'-fluoroguanosine-3'-phosphate
  modified_base 8: mod_base = OTHER; note = 2'-O-methyladenosine-3'-phosphate
  modified_base 9: mod_base = OTHER; note = 2'-deoxy-2'-fluoroguanosine-3'-phosphate
  modified_base 10: mod_base = OTHER; note = 2'-deoxy-2'-fluorocytidine-3'-phosphate
  modified_base 11: mod_base = OTHER; note = 2'-deoxy-2'-fluorouridine-3'-phosphate
  modified_base 12: mod_base = OTHER; note = 2'-O-methylguanosine-3'-phosphate
  modified_base 13: mod_base = OTHER; note = 2'-O-methyluridine-3'-phosphate
  modified_base 14: mod_base = OTHER; note = 2'-O-methylguanosine-3'-phosphate
  modified_base 15: mod_base = OTHER; note = 2'-O-methyluridine-3'-phosphate
  modified_base 16: mod_base = OTHER; note = 2'-O-methyluridine-3'-phosphate
  modified_base 17: mod_base = OTHER; note = 2'-O-methyluridine-3'-phosphate
  modified_base 18: mod_base = OTHER; note = 2'-O-methyladenosine-3'-phosphate
  modified_base 19: mod_base = OTHER; note = 2'-O-methyluridine-3'-phosphate
  modified_base 20: mod_base = OTHER; note = 2'-O-methyluridine-3'-phosphate
  modified_base 21: mod_base = OTHER; note = 2'-O-methyladenosine
ctcaaagagctgtgtttatta

SEQ ID NO: 4547 - RNA, 21 nt, synthetic construct
  source 1..21: mol_type = other RNA
  modified_base 1: mod_base = OTHER; note = 2'-O-methyluridine-3'-phosphate
  modified_base 2: mod_base = OTHER; note = 2'-O-methylcytidine-3'-phosphate
  modified_base 3: mod_base = OTHER; note = 2'-O-methyladenosine-3'-phosphate
  modified_base 4: mod_base = OTHER; note = 2'-O-methyladenosine-3'-phosphate
  modified_base 5: mod_base = OTHER; note = 2'-O-methyladenosine-3'-phosphate
  modified_base 6: mod_base = OTHER; note = 2'-O-methylguanosine-3'-phosphate
  modified_base 7: mod_base = OTHER; note = 2'-deoxy-2'-fluoroadenosine-3'-phosphate
  modified_base 8: mod_base = OTHER; note = 2'-O-methylguanosine-3'-phosphate
  modified_base 9: mod_base = OTHER; note = 2'-deoxy-2'-fluorocytidine-3'-phosphate
  modified_base 10: mod_base = OTHER; note = 2'-deoxy-2'-fluorouridine-3'-phosphate
  modified_base 11: mod_base = OTHER; note = 2'-deoxy-2'-fluoroguanosine-3'-phosphate
  modified_base 12: mod_base = OTHER; note = 2'-O-methyluridine-3'-phosphate
  modified_base 13: mod_base = OTHER; note = 2'-O-methylguanosine-3'-phosphate
  modified_base 14: mod_base = OTHER; note = 2'-O-methyluridine-3'-phosphate
  modified_base 15: mod_base = OTHER; note = 2'-O-methyluridine-3'-phosphate
  modified_base 16: mod_base = OTHER; note = 2'-O-methyluridine-3'-phosphate
  modified_base 17: mod_base = OTHER; note = 2'-O-methyladenosine-3'-phosphate
  modified_base 18: mod_base = OTHER; note = 2'-O-methyluridine-3'-phosphate
  modified_base 19: mod_base = OTHER; note = 2'-O-methyluridine-3'-phosphate
  modified_base 20: mod_base = OTHER; note = 2'-O-methyluridine-3'-phosphate
  modified_base 21: mod_base = OTHER; note = 2'-O-methyladenosine
tcaaagagctgtgtttattta

SEQ ID NO: 4548 - RNA, 21 nt, synthetic construct
  source 1..21: mol_type = other RNA
  modified_base 1: mod_base = OTHER; note = 2'-O-methylcytidine-3'-phosphate
  modified_base 2: mod_base = OTHER; note = 2'-O-methyladenosine-3'-phosphate
  modified_base 3: mod_base = OTHER; note = 2'-O-methyladenosine-3'-phosphate
  modified_base 4: mod_base = OTHER; note = 2'-O-methyladenosine-3'-phosphate
  modified_base 5: mod_base = OTHER; note = 2'-O-methylguanosine-3'-phosphate
  modified_base 6: mod_base = OTHER; note = 2'-O-methyladenosine-3'-phosphate
  modified_base 7: mod_base = OTHER; note = 2'-deoxy-2'-fluoroguanosine-3'-phosphate
  modified_base 8: mod_base = OTHER; note = 2'-O-methylcytidine-3'-phosphate
  modified_base 9: mod_base = OTHER; note = 2'-deoxy-2'-fluorouridine-3'-phosphate
  modified_base 10: mod_base = OTHER; note = 2'-deoxy-2'-fluoroguanosine-3'-phosphate
  modified_base 11: mod_base = OTHER; note = 2'-deoxy-2'-fluorouridine-3'-phosphate
  modified_base 12: mod_base = OTHER; note = 2'-O-methylguanosine-3'-phosphate
  modified_base 13: mod_base = OTHER; note = 2'-O-methyluridine-3'-phosphate
  modified_base 14: mod_base = OTHER; note = 2'-O-methyluridine-3'-phosphate
  modified_base 15: mod_base = OTHER; note = 2'-O-methyluridine-3'-phosphate
  modified_base 16: mod_base = OTHER; note = 2'-O-methyladenosine-3'-phosphate
  modified_base 17: mod_base = OTHER; note = 2'-O-methyluridine-3'-phosphate
  modified_base 18: mod_base = OTHER; note = 2'-O-methyluridine-3'-phosphate
  modified_base 19: mod_base = OTHER; note = 2'-O-methyluridine-3'-phosphate
  modified_base 20: mod_base = OTHER; note = 2'-O-methylcytidine-3'-phosphate
  modified_base 21: mod_base = OTHER; note = 2'-O-methyladenosine
caaagagctgtgtttatttca

SEQ ID NO: 4549 - RNA, 21 nt, synthetic construct
  source 1..21: mol_type = other RNA
  modified_base 1: mod_base = OTHER; note = 2'-O-methyladenosine-3'-phosphate
  modified_base 2: mod_base = OTHER; note = 2'-O-methyladenosine-3'-phosphate
  modified_base 3: mod_base = OTHER; note = 2'-O-methyladenosine-3'-phosphate
  modified_base 4: mod_base = OTHER; note = 2'-O-methylguanosine-3'-phosphate
  modified_base 5: mod_base = OTHER; note = 2'-O-methyladenosine-3'-phosphate
  modified_base 6: mod_base = OTHER; note = 2'-O-methylguanosine-3'-phosphate
  modified_base 7: mod_base = OTHER; note = 2'-deoxy-2'-fluorocytidine-3'-phosphate
  modified_base 8: mod_base = OTHER; note = 2'-O-methyluridine-3'-phosphate
  modified_base 9: mod_base = OTHER; note = 2'-deoxy-2'-fluoroguanosine-3'-phosphate
  modified_base 10: mod_base = OTHER; note = 2'-deoxy-2'-fluorouridine-3'-phosphate
  modified_base 11: mod_base = OTHER; note = 2'-deoxy-2'-fluoroguanosine-3'-phosphate
  modified_base 12: mod_base = OTHER; note = 2'-O-methyluridine-3'-phosphate
  modified_base 13: mod_base = OTHER; note = 2'-O-methyluridine-3'-phosphate
  modified_base 14: mod_base = OTHER; note = 2'-O-methyluridine-3'-phosphate
  modified_base 15: mod_base = OTHER; note = 2'-O-methyladenosine-3'-phosphate
  modified_base 16: mod_base = OTHER; note = 2'-O-methyluridine-3'-phosphate
  modified_base 17: mod_base = OTHER; note = 2'-O-methyluridine-3'-phosphate
  modified_base 18: mod_base = OTHER; note = 2'-O-methyluridine-3'-phosphate
  modified_base 19: mod_base = OTHER; note = 2'-O-methylcytidine-3'-phosphate
  modified_base 20: mod_base = OTHER; note = 2'-O-methyladenosine-3'-phosphate
  modified_base 21: mod_base = OTHER; note = 2'-O-methyladenosine
aaagagctgtgtttatttcaa

SEQ ID NO: 4550 - RNA, 21 nt, synthetic construct
  source 1..21: mol_type = other RNA
  modified_base 1: mod_base = OTHER; note = 2'-O-methyladenosine-3'-phosphate
  modified_base 2: mod_base = OTHER; note = 2'-O-methylguanosine-3'-phosphate
  modified_base 3: mod_base = OTHER; note = 2'-O-methylcytidine-3'-phosphate
  modified_base 4: mod_base = OTHER; note = 2'-O-methyluridine-3'-phosphate
  modified_base 5: mod_base = OTHER; note = 2'-O-methylguanosine-3'-phosphate
  modified_base 6: mod_base = OTHER; note = 2'-O-methyluridine-3'-phosphate
  modified_base 7: mod_base = OTHER; note = 2'-deoxy-2'-fluoroguanosine-3'-phosphate
  modified_base 8: mod_base = OTHER; note = 2'-O-methyluridine-3'-phosphate
  modified_base 9: mod_base = OTHER; note = 2'-deoxy-2'-fluorouridine-3'-phosphate
  modified_base 10: mod_base = OTHER; note = 2'-deoxy-2'-fluorouridine-3'-phosphate
  modified_base 11: mod_base = OTHER; note = 2'-deoxy-2'-fluoroadenosine-3'-phosphate
  modified_base 12: mod_base = OTHER; note = 2'-O-methyluridine-3'-phosphate
  modified_base 13: mod_base = OTHER; note = 2'-O-methyluridine-3'-phosphate
  modified_base 14: mod_base = OTHER; note = 2'-O-methyluridine-3'-phosphate
  modified_base 15: mod_base = OTHER; note = 2'-O-methylcytidine-3'-phosphate
  modified_base 16: mod_base = OTHER; note = 2'-O-methyladenosine-3'-phosphate
  modified_base 17: mod_base = OTHER; note = 2'-O-methyluridine-3'-phosphate
  modified_base 18: mod_base = OTHER; note = 2'-O-methyluridine-3'-phosphate
  modified_base 19: mod_base = OTHER; note = 2'-O-methylguanosine-3'-phosphate
  modified_base 20: mod_base = OTHER; note = 2'-O-methyladenosine-3'-phosphate
  modified_base 21: mod_base = OTHER; note = 2'-O-methyladenosine
agctgtgtttatttcattgaa

SEQ ID NO: 4551 - RNA, 21 nt, synthetic construct
  source 1..21: mol_type = other RNA
  modified_base 1: mod_base = OTHER; note = 2'-O-methylguanosine-3'-phosphate
  modified_base 2: mod_base = OTHER; note = 2'-O-methylcytidine-3'-phosphate
  modified_base 3: mod_base = OTHER; note = 2'-O-methyluridine-3'-phosphate
  modified_base 4: mod_base = OTHER; note = 2'-O-methylguanosine-3'-phosphate
  modified_base 5: mod_base = OTHER; note = 2'-O-methyluridine-3'-phosphate
  modified_base 6: mod_base = OTHER; note = 2'-O-methylguanosine-3'-phosphate
  modified_base 7: mod_base = OTHER; note = 2'-deoxy-2'-fluorouridine-3'-phosphate
  modified_base 8: mod_base = OTHER; note = 2'-O-methyluridine-3'-phosphate
  modified_base 9: mod_base = OTHER; note = 2'-deoxy-2'-fluorouridine-3'-phosphate
  modified_base 10: mod_base = OTHER; note = 2'-deoxy-2'-fluoroadenosine-3'-phosphate
  modified_base 11: mod_base = OTHER; note = 2'-deoxy-2'-fluorouridine-3'-phosphate
  modified_base 12: mod_base = OTHER; note = 2'-O-methyluridine-3'-phosphate
  modified_base 13: mod_base = OTHER; note = 2'-O-methyluridine-3'-phosphate
  modified_base 14: mod_base = OTHER; note = 2'-O-methylcytidine-3'-phosphate
  modified_base 15: mod_base = OTHER; note = 2'-O-methyladenosine-3'-phosphate
  modified_base 16: mod_base = OTHER; note = 2'-O-methyluridine-3'-phosphate
  modified_base 17: mod_base = OTHER; note = 2'-O-methyluridine-3'-phosphate
  modified_base 18: mod_base = OTHER; note = 2'-O-methylguanosine-3'-phosphate
  modified_base 19: mod_base = OTHER; note = 2'-O-methyladenosine-3'-phosphate
  modified_base 20: mod_base = OTHER; note = 2'-O-methylcytidine-3'-phosphate
  modified_base 21: mod_base = OTHER; note = 2'-O-methyladenosine
gctgtgtttatttcattgaca

SEQ ID NO: 4552 - RNA, 21 nt, synthetic construct
  source 1..21: mol_type = other RNA
  modified_base 1: mod_base = OTHER; note = 2'-O-methylguanosine-3'-phosphate
  modified_base 2: mod_base = OTHER; note = 2'-O-methyluridine-3'-phosphate
  modified_base 3: mod_base = OTHER; note = 2'-O-methylguanosine-3'-phosphate
  modified_base 4: mod_base = OTHER; note = 2'-O-methyluridine-3'-phosphate
  modified_base 5: mod_base = OTHER; note = 2'-O-methyluridine-3'-phosphate
  modified_base 6: mod_base = OTHER; note = 2'-O-methyluridine-3'-phosphate
  modified_base 7: mod_base = OTHER; note = 2'-deoxy-2'-fluoroadenosine-3'-phosphate
  modified_base 8: mod_base = OTHER; note = 2'-O-methyluridine-3'-phosphate
  modified_base 9: mod_base = OTHER; note = 2'-deoxy-2'-fluorouridine-3'-phosphate
  modified_base 10: mod_base = OTHER; note = 2'-deoxy-2'-fluorouridine-3'-phosphate
  modified_base 11: mod_base = OTHER; note = 2'-deoxy-2'-fluorocytidine-3'-phosphate
  modified_base 12: mod_base = OTHER; note = 2'-O-methyladenosine-3'-phosphate
  modified_base 13: mod_base = OTHER; note = 2'-O-methyluridine-3'-phosphate
  modified_base 14: mod_base = OTHER; note = 2'-O-methyluridine-3'-phosphate
  modified_base 15: mod_base = OTHER; note = 2'-O-methylguanosine-3'-phosphate
  modified_base 16: mod_base = OTHER; note = 2'-O-methyladenosine-3'-phosphate
  modified_base 17: mod_base = OTHER; note = 2'-O-methylcytidine-3'-phosphate
  modified_base 18: mod_base = OTHER; note = 2'-O-methyladenosine-3'-phosphate
  modified_base 19: mod_base = OTHER; note = 2'-O-methyladenosine-3'-phosphate
  modified_base 20: mod_base = OTHER; note = 2'-O-methyladenosine-3'-phosphate
  modified_base 21: mod_base = OTHER; note = 2'-O-methyladenosine
gtgtttatttcattgacaaaa

SEQ ID NO: 4553 - RNA, 21 nt, synthetic construct
  source 1..21: mol_type = other RNA
  modified_base 1: mod_base = OTHER; note = 2'-O-methyladenosine-3'-phosphate
  modified_base 2: mod_base = OTHER; note = 2'-O-methyluridine-3'-phosphate
  modified_base 3: mod_base = OTHER; note = 2'-O-methyluridine-3'-phosphate
  modified_base 4: mod_base = OTHER; note = 2'-O-methyluridine-3'-phosphate
  modified_base 5: mod_base = OTHER; note = 2'-O-methylcytidine-3'-phosphate
  modified_base 6: mod_base = OTHER; note = 2'-O-methyladenosine-3'-phosphate
  modified_base 7: mod_base = OTHER; note = 2'-deoxy-2'-fluorouridine-3'-phosphate
  modified_base 8: mod_base = OTHER; note = 2'-O-methyluridine-3'-phosphate
  modified_base 9: mod_base = OTHER; note = 2'-deoxy-2'-fluoroguanosine-3'-phosphate
  modified_base 10: mod_base = OTHER; note = 2'-deoxy-2'-fluoroadenosine-3'-phosphate
  modified_base 11: mod_base = OTHER; note = 2'-deoxy-2'-fluorocytidine-3'-phosphate
  modified_base 12: mod_base = OTHER; note = 2'-O-methyladenosine-3'-phosphate
  modified_base 13: mod_base = OTHER; note = 2'-O-methyladenosine-3'-phosphate
  modified_base 14: mod_base = OTHER; note = 2'-O-methyladenosine-3'-phosphate
  modified_base 15: mod_base = OTHER; note = 2'-O-methyluridine-3'-phosphate
  modified_base 16: mod_base = OTHER; note = 2'-O-methyladenosine-3'-phosphate
  modified_base 17: mod_base = OTHER; note = 2'-O-methylguanosine-3'-phosphate
  modified_base 18: mod_base = OTHER; note = 2'-O-methyladenosine-3'-phosphate
  modified_base 19: mod_base = OTHER; note = 2'-O-methyluridine-3'-phosphate
  modified_base 20: mod_base = OTHER; note = 2'-O-methyluridine-3'-phosphate
  modified_base 21: mod_base = OTHER; note = 2'-O-methyladenosine
atttcattgacaaatagatta

SEQ ID NO: 4554 - RNA, 21 nt, synthetic construct
  source 1..21: mol_type = other RNA
  modified_base 1: mod_base = OTHER; note = 2'-O-methyluridine-3'-phosphate
  modified_base 2: mod_base = OTHER; note = 2'-O-methyluridine-3'-phosphate
  modified_base 3: mod_base = OTHER; note = 2'-O-methyluridine-3'-phosphate
  modified_base 4: mod_base = OTHER; note = 2'-O-methylcytidine-3'-phosphate
  modified_base 5: mod_base = OTHER; note = 2'-O-methyladenosine-3'-phosphate
  modified_base 6: mod_base = OTHER; note = 2'-O-methyluridine-3'-phosphate
  modified_base 7: mod_base = OTHER; note = 2'-deoxy-2'-fluorouridine-3'-phosphate
  modified_base 8: mod_base = OTHER; note = 2'-O-methylguanosine-3'-phosphate
  modified_base 9: mod_base = OTHER; note = 2'-deoxy-2'-fluoroadenosine-3'-phosphate
  modified_base 10: mod_base = OTHER; note = 2'-deoxy-2'-fluorocytidine-3'-phosphate
  modified_base 11: mod_base = OTHER; note = 2'-deoxy-2'-fluoroadenosine-3'-phosphate
  modified_base 12: mod_base = OTHER; note = 2'-O-methyladenosine-3'-phosphate
  modified_base 13: mod_base = OTHER; note = 2'-O-methyladenosine-3'-phosphate
  modified_base 14: mod_base = OTHER; note = 2'-O-methyluridine-3'-phosphate
  modified_base 15: mod_base = OTHER; note = 2'-O-methyladenosine-3'-phosphate
  modified_base 16: mod_base = OTHER; note = 2'-O-methylguanosine-3'-phosphate
  modified_base 17: mod_base = OTHER; note = 2'-O-methyladenosine-3'-phosphate
  modified_base 18: mod_base = OTHER; note = 2'-O-methyluridine-3'-phosphate
  modified_base 19: mod_base = OTHER; note = 2'-O-methyluridine-3'-phosphate
  modified_base 20: mod_base = OTHER; note = 2'-O-methyladenosine-3'-phosphate
  modified_base 21: mod_base = OTHER; note = 2'-O-methyladenosine
tttcattgacaaatagattaa

SEQ ID NO: 4555 - RNA, 21 nt, synthetic construct
  source 1..21: mol_type = other RNA
  modified_base 1: mod_base = OTHER; note = 2'-O-methyluridine-3'-phosphate
  modified_base 2: mod_base = OTHER; note = 2'-O-methyluridine-3'-phosphate
  modified_base 3: mod_base = OTHER; note = 2'-O-methylcytidine-3'-phosphate
  modified_base 4: mod_base = OTHER; note = 2'-O-methyladenosine-3'-phosphate
  modified_base 5: mod_base = OTHER; note = 2'-O-methyluridine-3'-phosphate
  modified_base 6: mod_base = OTHER; note = 2'-O-methyluridine-3'-phosphate
  modified_base 7: mod_base = OTHER; note = 2'-deoxy-2'-fluoroguanosine-3'-phosphate
  modified_base 8: mod_base = OTHER; note = 2'-O-methyladenosine-3'-phosphate
  modified_base 9: mod_base = OTHER; note = 2'-deoxy-2'-fluorocytidine-3'-phosphate
  modified_base 10: mod_base = OTHER; note = 2'-deoxy-2'-fluoroadenosine-3'-phosphate
  modified_base 11: mod_base = OTHER; note = 2'-deoxy-2'-fluoroadenosine-3'-phosphate
  modified_base 12: mod_base = OTHER; note = 2'-O-methyladenosine-3'-phosphate
  modified_base 13: mod_base = OTHER; note = 2'-O-methyluridine-3'-phosphate
  modified_base 14: mod_base = OTHER; note = 2'-O-methyladenosine-3'-phosphate
  modified_base 15: mod_base = OTHER; note = 2'-O-methylguanosine-3'-phosphate
  modified_base 16: mod_base = OTHER; note = 2'-O-methyladenosine-3'-phosphate
  modified_base 17: mod_base = OTHER; note = 2'-O-methyluridine-3'-phosphate
  modified_base 18: mod_base = OTHER; note = 2'-O-methyluridine-3'-phosphate
  modified_base 19: mod_base = OTHER; note = 2'-O-methyladenosine-3'-phosphate
  modified_base 20: mod_base = OTHER; note = 2'-O-methyluridine-3'-phosphate
  modified_base 21: mod_base = OTHER; note = 2'-O-methyladenosine
ttcattgacaaatagattata

SEQ ID NO: 4556 - RNA, 21 nt, synthetic construct
  source 1..21: mol_type = other RNA
  modified_base 1: mod_base = OTHER; note = 2'-O-methyluridine-3'-phosphate
  modified_base 2: mod_base = OTHER; note = 2'-O-methylcytidine-3'-phosphate
  modified_base 3: mod_base = OTHER; note = 2'-O-methyladenosine-3'-phosphate
  modified_base 4: mod_base = OTHER; note = 2'-O-methyluridine-3'-phosphate
  modified_base 5: mod_base = OTHER; note = 2'-O-methyluridine-3'-phosphate
  modified_base 6: mod_base = OTHER; note = 2'-O-methylguanosine-3'-phosphate
  modified_base 7: mod_base = OTHER; note = 2'-deoxy-2'-fluoroadenosine-3'-phosphate
  modified_base 8: mod_base = OTHER; note = 2'-O-methylcytidine-3'-phosphate
  modified_base 9: mod_base = OTHER; note = 2'-deoxy-2'-fluoroadenosine-3'-phosphate
  modified_base 10: mod_base = OTHER; note = 2'-deoxy-2'-fluoroadenosine-3'-phosphate
  modified_base 11: mod_base = OTHER; note = 2'-deoxy-2'-fluoroadenosine-3'-phosphate
  modified_base 12: mod_base = OTHER; note = 2'-O-methyluridine-3'-phosphate
  modified_base 13: mod_base = OTHER; note = 2'-O-methyladenosine-3'-phosphate
  modified_base 14: mod_base = OTHER; note = 2'-O-methylguanosine-3'-phosphate
  modified_base 15: mod_base = OTHER; note = 2'-O-methyladenosine-3'-phosphate
  modified_base 16: mod_base = OTHER; note = 2'-O-methyluridine-3'-phosphate
  modified_base 17: mod_base = OTHER; note = 2'-O-methyluridine-3'-phosphate
  modified_base 18: mod_base = OTHER; note = 2'-O-methyladenosine-3'-phosphate
  modified_base 19: mod_base = OTHER; note = 2'-O-methyluridine-3'-phosphate
  modified_base 20: mod_base = OTHER; note = 2'-O-methyluridine-3'-phosphate
  modified_base 21: mod_base = OTHER; note = 2'-O-methyladenosine
tcattgacaaatagattatta

SEQ ID NO: 4557 - RNA, 21 nt, synthetic construct
  source 1..21: mol_type = other RNA
  modified_base 1: mod_base = OTHER; note = 2'-O-methylcytidine-3'-phosphate
  modified_base 2: mod_base = OTHER; note = 2'-O-methyladenosine-3'-phosphate
  modified_base 3: mod_base = OTHER; note = 2'-O-methyluridine-3'-phosphate
  modified_base 4: mod_base = OTHER; note = 2'-O-methyluridine-3'-phosphate
  modified_base 5: mod_base = OTHER; note = 2'-O-methylguanosine-3'-phosphate
  modified_base 6: mod_base = OTHER; note = 2'-O-methyladenosine-3'-phosphate
  modified_base 7: mod_base = OTHER; note = 2'-deoxy-2'-fluorocytidine-3'-phosphate
  modified_base 8: mod_base = OTHER; note = 2'-O-methyladenosine-3'-phosphate
  modified_base 9: mod_base = OTHER; note = 2'-deoxy-2'-fluoroadenosine-3'-phosphate
  modified_base 10: mod_base = OTHER; note = 2'-deoxy-2'-fluoroadenosine-3'-phosphate
  modified_base 11: mod_base = OTHER; note = 2'-deoxy-2'-fluorouridine-3'-phosphate
  modified_base 12: mod_base = OTHER; note = 2'-O-methyladenosine-3'-phosphate
  modified_base 13: mod_base = OTHER; note = 2'-O-methylguanosine-3'-phosphate
  modified_base 14: mod_base = OTHER; note = 2'-O-methyladenosine-3'-phosphate
  modified_base 15: mod_base = OTHER; note = 2'-O-methyluridine-3'-phosphate
  modified_base 16: mod_base = OTHER; note = 2'-O-methyluridine-3'-phosphate
  modified_base 17: mod_base = OTHER; note = 2'-O-methyladenosine-3'-phosphate
  modified_base 18: mod_base = OTHER; note = 2'-O-methyluridine-3'-phosphate
  modified_base 19: mod_base = OTHER; note = 2'-O-methyluridine-3'-phosphate
  modified_base 20: mod_base = OTHER; note = 2'-O-methyluridine-3'-phosphate
  modified_base 21: mod_base = OTHER; note = 2'-O-methyladenosine
cattgacaaatagattattta

SEQ ID NO: 4558 - RNA, 21 nt, synthetic construct
  source 1..21: mol_type = other RNA
  modified_base 1: mod_base = OTHER; note = 2'-O-methyladenosine-3'-phosphate
  modified_base 2: mod_base = OTHER; note = 2'-O-methyluridine-3'-phosphate
  modified_base 3: mod_base = OTHER; note = 2'-O-methyluridine-3'-phosphate
  modified_base 4: mod_base = OTHER; note = 2'-O-methylguanosine-3'-phosphate
  modified_base 5: mod_base = OTHER; note = 2'-O-methyladenosine-3'-phosphate
  modified_base 6: mod_base = OTHER; note = 2'-O-methylcytidine-3'-phosphate
  modified_base 7: mod_base = OTHER; note = 2'-deoxy-2'-fluoroadenosine-3'-phosphate
  modified_base 8: mod_base = OTHER; note = 2'-O-methyladenosine-3'-phosphate
  modified_base 9: mod_base = OTHER; note = 2'-deoxy-2'-fluoroadenosine-3'-phosphate
  modified_base 10: mod_base = OTHER; note = 2'-deoxy-2'-fluorouridine-3'-phosphate
  modified_base 11: mod_base = OTHER; note = 2'-deoxy-2'-fluoroadenosine-3'-phosphate
  modified_base 12: mod_base = OTHER; note = 2'-O-methylguanosine-3'-phosphate
  modified_base 13: mod_base = OTHER; note = 2'-O-methyladenosine-3'-phosphate
  modified_base 14: mod_base = OTHER; note = 2'-O-methyluridine-3'-phosphate
  modified_base 15: mod_base = OTHER; note = 2'-O-methyluridine-3'-phosphate
  modified_base 16: mod_base = OTHER; note = 2'-O-methyladenosine-3'-phosphate
  modified_base 17: mod_base = OTHER; note = 2'-O-methyluridine-3'-phosphate
  modified_base 18: mod_base = OTHER; note = 2'-O-methyluridine-3'-phosphate
  modified_base 19: mod_base = OTHER; note = 2'-O-methyluridine-3'-phosphate
  modified_base 20: mod_base = OTHER; note = 2'-O-methylguanosine-3'-phosphate
  modified_base 21: mod_base = OTHER; note = 2'-O-methyladenosine
attgacaaatagattatttga

SEQ ID NO: 4559 - RNA, 21 nt, synthetic construct
  source 1..21: mol_type = other RNA
  modified_base 1: mod_base = OTHER; note = 2'-O-methyluridine-3'-phosphate
  modified_base 2: mod_base = OTHER; note = 2'-O-methyluridine-3'-phosphate
  modified_base 3: mod_base = OTHER; note = 2'-O-methylguanosine-3'-phosphate
  modified_base 4: mod_base = OTHER; note = 2'-O-methyladenosine-3'-phosphate
  modified_base 5: mod_base = OTHER; note = 2'-O-methylcytidine-3'-phosphate
  modified_base 6: mod_base = OTHER; note = 2'-O-methyladenosine-3'-phosphate
  modified_base 7: mod_base = OTHER; note = 2'-deoxy-2'-fluoroadenosine-3'-phosphate
  modified_base 8: mod_base = OTHER; note = 2'-O-methyladenosine-3'-phosphate
  modified_base 9: mod_base = OTHER; note = 2'-deoxy-2'-fluorouridine-3'-phosphate
  modified_base 10: mod_base = OTHER; note = 2'-deoxy-2'-fluoroadenosine-3'-phosphate
  modified_base 11: mod_base = OTHER; note = 2'-deoxy-2'-fluoroguanosine-3'-phosphate
  modified_base 12: mod_base = OTHER; note = 2'-O-methyladenosine-3'-phosphate
  modified_base 13: mod_base = OTHER; note = 2'-O-methyluridine-3'-phosphate
  modified_base 14: mod_base = OTHER; note = 2'-O-methyluridine-3'-phosphate
  modified_base 15: mod_base = OTHER; note = 2'-O-methyladenosine-3'-phosphate
  modified_base 16: mod_base = OTHER; note = 2'-O-methyluridine-3'-phosphate
  modified_base 17: mod_base = OTHER; note = 2'-O-methyluridine-3'-phosphate
  modified_base 18: mod_base = OTHER; note = 2'-O-methyluridine-3'-phosphate
  modified_base 19: mod_base = OTHER; note = 2'-O-methylguanosine-3'-phosphate
  modified_base 20: mod_base = OTHER; note = 2'-O-methyluridine-3'-phosphate
  modified_base 21: mod_base = OTHER; note = 2'-O-methyladenosine
ttgacaaatagattatttgta

SEQ ID NO: 4560 - RNA, 21 nt, synthetic construct
  source 1..21: mol_type = other RNA
  modified_base 1: mod_base = OTHER; note = 2'-O-methyluridine-3'-phosphate
  modified_base 2: mod_base = OTHER; note = 2'-O-methylguanosine-3'-phosphate
  modified_base 3: mod_base = OTHER; note = 2'-O-methyladenosine-3'-phosphate
  modified_base 4: mod_base = OTHER; note = 2'-O-methylcytidine-3'-phosphate
  modified_base 5: mod_base = OTHER; note = 2'-O-methyladenosine-3'-phosphate
  modified_base 6: mod_base = OTHER; note = 2'-O-methyladenosine-3'-phosphate
  modified_base 7: mod_base = OTHER; note = 2'-deoxy-2'-fluoroadenosine-3'-phosphate
  modified_base 8: mod_base = OTHER; note = 2'-O-methyluridine-3'-phosphate
  modified_base 9: mod_base = OTHER; note = 2'-deoxy-2'-fluoroadenosine-3'-phosphate
  modified_base 10: mod_base = OTHER; note = 2'-deoxy-2'-fluoroguanosine-3'-phosphate
  modified_base 11: mod_base = OTHER; note = 2'-deoxy-2'-fluoroadenosine-3'-phosphate
  modified_base 12: mod_base = OTHER; note = 2'-O-methyluridine-3'-phosphate
  modified_base 13: mod_base = OTHER; note = 2'-O-methyluridine-3'-phosphate
  modified_base 14: mod_base = OTHER; note = 2'-O-methyladenosine-3'-phosphate
  modified_base 15: mod_base = OTHER; note = 2'-O-methyluridine-3'-phosphate
  modified_base 16: mod_base = OTHER; note = 2'-O-methyluridine-3'-phosphate
  modified_base 17: mod_base = OTHER; note = 2'-O-methyluridine-3'-phosphate
  modified_base 18: mod_base = OTHER; note = 2'-O-methylguanosine-3'-phosphate
  modified_base 19: mod_base = OTHER; note = 2'-O-methyluridine-3'-phosphate
  modified_base 20: mod_base = OTHER; note = 2'-O-methyladenosine-3'-phosphate
  modified_base 21: mod_base = OTHER; note = 2'-O-methyladenosine
tgacaaatagattatttgtaa

SEQ ID NO: 4561 - RNA, 21 nt, synthetic construct
  source 1..21: mol_type = other RNA
  modified_base 1: mod_base = OTHER; note = 2'-O-methylguanosine-3'-phosphate
  modified_base 2: mod_base = OTHER; note = 2'-O-methyladenosine-3'-phosphate
  modified_base 3: mod_base = OTHER; note = 2'-O-methylcytidine-3'-phosphate
  modified_base 4: mod_base = OTHER; note = 2'-O-methyladenosine-3'-phosphate
  modified_base 5: mod_base = OTHER; note = 2'-O-methyladenosine-3'-phosphate
  modified_base 6: mod_base = OTHER; note = 2'-O-methyladenosine-3'-phosphate
  modified_base 7: mod_base = OTHER; note = 2'-deoxy-2'-fluorouridine-3'-phosphate
  modified_base 8: mod_base = OTHER; note = 2'-O-methyladenosine-3'-phosphate
  modified_base 9: mod_base = OTHER; note = 2'-deoxy-2'-fluoroguanosine-3'-phosphate
  modified_base 10: mod_base = OTHER; note = 2'-deoxy-2'-fluoroadenosine-3'-phosphate
  modified_base 11: mod_base = OTHER; note = 2'-deoxy-2'-fluorouridine-3'-phosphate
  modified_base 12: mod_base = OTHER; note = 2'-O-methyluridine-3'-phosphate
  modified_base 13: mod_base = OTHER; note = 2'-O-methyladenosine-3'-phosphate
  modified_base 14: mod_base = OTHER; note = 2'-O-methyluridine-3'-phosphate
  modified_base 15: mod_base = OTHER; note = 2'-O-methyluridine-3'-phosphate
  modified_base 16: mod_base = OTHER; note = 2'-O-methyluridine-3'-phosphate
  modified_base 17: mod_base = OTHER; note = 2'-O-methylguanosine-3'-phosphate
  modified_base 18: mod_base = OTHER; note = 2'-O-methyluridine-3'-phosphate
  modified_base 19: mod_base = OTHER; note = 2'-O-methyladenosine-3'-phosphate
  modified_base 20: mod_base = OTHER; note = 2'-O-methyluridine-3'-phosphate
  modified_base 21: mod_base = OTHER; note = 2'-O-methyladenosine
gacaaatagattatttgtata

SEQ ID NO: 4562 - RNA, 21 nt, synthetic construct
  source 1..21: mol_type = other RNA
  modified_base 1: mod_base = OTHER; note = 2'-O-methyladenosine-3'-phosphate
  modified_base 2: mod_base = OTHER; note = 2'-O-methylcytidine-3'-phosphate
  modified_base 3: mod_base = OTHER; note = 2'-O-methyladenosine-3'-phosphate
  modified_base 4: mod_base = OTHER; note = 2'-O-methyladenosine-3'-phosphate
  modified_base 5: mod_base = OTHER; note = 2'-O-methyladenosine-3'-phosphate
  modified_base 6: mod_base = OTHER; note = 2'-O-methyluridine-3'-phosphate
  modified_base 7: mod_base = OTHER; note = 2'-deoxy-2'-fluoroadenosine-3'-phosphate
  modified_base 8: mod_base = OTHER; note = 2'-O-methylguanosine-3'-phosphate
  modified_base 9: mod_base = OTHER; note = 2'-deoxy-2'-fluoroadenosine-3'-phosphate
  modified_base 10: mod_base = OTHER; note = 2'-deoxy-2'-fluorouridine-3'-phosphate
  modified_base 11: mod_base = OTHER; note = 2'-deoxy-2'-fluorouridine-3'-phosphate
  modified_base 12: mod_base = OTHER; note = 2'-O-methyladenosine-3'-phosphate
  modified_base 13: mod_base = OTHER; note = 2'-O-methyluridine-3'-phosphate
  modified_base 14: mod_base = OTHER; note = 2'-O-methyluridine-3'-phosphate
  modified_base 15: mod_base = OTHER; note = 2'-O-methyluridine-3'-phosphate
  modified_base 16: mod_base = OTHER; note = 2'-O-methylguanosine-3'-phosphate
  modified_base 17: mod_base = OTHER; note = 2'-O-methyluridine-3'-phosphate
  modified_base 18: mod_base = OTHER; note = 2'-O-methyladenosine-3'-phosphate
  modified_base 19: mod_base = OTHER; note = 2'-O-methyluridine-3'-phosphate
  modified_base 20: mod_base = OTHER; note = 2'-O-methyluridine-3'-phosphate
  modified_base 21: mod_base = OTHER; note = 2'-O-methyladenosine
acaaatagattatttgtatta

SEQ ID NO: 4563 - RNA, 21 nt, synthetic construct
  source 1..21: mol_type = other RNA
  modified_base 1: mod_base = OTHER; note = 2'-O-methylcytidine-3'-phosphate
  modified_base 2: mod_base = OTHER; note = 2'-O-methyladenosine-3'-phosphate
  modified_base 3: mod_base = OTHER; note = 2'-O-methyladenosine-3'-phosphate
  modified_base 4: mod_base = OTHER; note = 2'-O-methyladenosine-3'-phosphate
  modified_base 5: mod_base = OTHER; note = 2'-O-methyluridine-3'-phosphate
  modified_base 6: mod_base = OTHER; note = 2'-O-methyladenosine-3'-phosphate
  modified_base 7: mod_base = OTHER; note = 2'-deoxy-2'-fluoroguanosine-3'-phosphate
  modified_base 8: mod_base = OTHER; note = 2'-O-methyladenosine-3'-phosphate
  modified_base 9: mod_base = OTHER; note = 2'-deoxy-2'-fluorouridine-3'-phosphate
  modified_base 10: mod_base = OTHER; note = 2'-deoxy-2'-fluorouridine-3'-phosphate
  modified_base 11: mod_base = OTHER; note = 2'-deoxy-2'-fluoroadenosine-3'-phosphate
  modified_base 12: mod_base = OTHER; note = 2'-O-methyluridine-3'-phosphate
  modified_base 13: mod_base = OTHER; note = 2'-O-methyluridine-3'-phosphate
  modified_base 14: mod_base = OTHER; note = 2'-O-methyluridine-3'-phosphate
  modified_base 15: mod_base = OTHER; note = 2'-O-methylguanosine-3'-phosphate
  modified_base 16: mod_base = OTHER; note = 2'-O-methyluridine-3'-phosphate
  modified_base 17: mod_base = OTHER; note = 2'-O-methyladenosine-3'-phosphate
  modified_base 18: mod_base = OTHER; note = 2'-O-methyluridine-3'-phosphate
  modified_base 19: mod_base = OTHER; note = 2'-O-methyluridine-3'-phosphate
  modified_base 20: mod_base = OTHER; note = 2'-O-methylcytidine-3'-phosphate
  modified_base 21: mod_base = OTHER; note = 2'-O-methyladenosine
caaatagattatttgtattca

SEQ ID NO: 4564 - RNA, 21 nt, synthetic construct
  source 1..21: mol_type = other RNA
  modified_base 1: mod_base = OTHER; note = 2'-O-methyladenosine-3'-phosphate
  modified_base 2: mod_base = OTHER; note = 2'-O-methyladenosine-3'-phosphate
  modified_base 3: mod_base = OTHER; note = 2'-O-methyladenosine-3'-phosphate
  modified_base 4: mod_base = OTHER; note = 2'-O-methyluridine-3'-phosphate
  modified_base 5: mod_base = OTHER; note = 2'-O-methyladenosine-3'-phosphate
  modified_base 6: mod_base = OTHER; note = 2'-O-methylguanosine-3'-phosphate
  modified_base 7: mod_base = OTHER; note = 2'-deoxy-2'-fluoroadenosine-3'-phosphate
  modified_base 8: mod_base = OTHER; note = 2'-O-methyluridine-3'-phosphate
  modified_base 9: mod_base = OTHER; note = 2'-deoxy-2'-fluorouridine-3'-phosphate
  modified_base 10: mod_base = OTHER; note = 2'-deoxy-2'-fluoroadenosine-3'-phosphate
  modified_base 11: mod_base = OTHER; note = 2'-deoxy-2'-fluorouridine-3'-phosphate
  modified_base 12: mod_base = OTHER; note = 2'-O-methyluridine-3'-phosphate
  modified_base 13: mod_base = OTHER; note = 2'-O-methyluridine-3'-phosphate
  modified_base 14: mod_base = OTHER; note = 2'-O-methylguanosine-3'-phosphate
  modified_base 15: mod_base = OTHER; note = 2'-O-methyluridine-3'-phosphate
  modified_base 16: mod_base = OTHER; note = 2'-O-methyladenosine-3'-phosphate
  modified_base 17: mod_base = OTHER; note = 2'-O-methyluridine-3'-phosphate
  modified_base 18: mod_base = OTHER; note = 2'-O-methyluridine-3'-phosphate
  modified_base 19: mod_base = OTHER; note = 2'-O-methylcytidine-3'-phosphate
  modified_base 20: mod_base = OTHER; note = 2'-O-methyladenosine-3'-phosphate
  modified_base 21: mod_base = OTHER; note = 2'-O-methyladenosine
aaatagattatttgtattcaa

SEQ ID NO: 4565 - RNA, 23 nt, synthetic construct
  source 1..23: mol_type = other RNA
  modified_base 1: mod_base = OTHER; note = 2'-O-methyluridine-3'-phosphate 5'phosphate
  modified_base 2: mod_base = OTHER; note = 2'-deoxy-2'-fluoroadenosine-3'-phosphate
  modified_base 3: mod_base = OTHER; note = 2'-O-methylguanosine-3'-phosphate
  modified_base 4: mod_base = OTHER; note = 2'-O-methyluridine-3'-phosphate
  modified_base 5: mod_base = OTHER; note = 2'-O-methylguanosine-3'-phosphate
  modified_base 6: mod_base = OTHER; note = 2'-deoxy-2'-fluorocytidine-3'-phosphate
  modified_base 7: mod_base = OTHER; note = 2'-O-methylcytidine-3'-phosphate
  modified_base 8: mod_base = OTHER; note = 2'-O-methylcytidine-3'-phosphate
  modified_base 9: mod_base = OTHER; note = 2'-O-methyladenosine-3'-phosphate
  modified_base 10: mod_base = OTHER; note = 2'-O-methylguanosine-3'-phosphate
  modified_base 11: mod_base = OTHER; note = 2'-O-methyladenosine-3'-phosphate
  modified_base 12: mod_base = OTHER; note = 2'-O-methyladenosine-3'-phosphate
  modified_base 13: mod_base = OTHER; note = 2'-O-methyladenosine-3'-phosphate
  modified_base 14: mod_base = OTHER; note = 2'-deoxy-2'-fluoroguanosine-3'-phosphate
  modified_base 15: mod_base = OTHER; note = 2'-O-methyluridine-3'-phosphate
  modified_base 16: mod_base = OTHER; note = 2'-deoxy-2'-fluoroguanosine-3'-phosphate
  modified_base 17: mod_base = OTHER; note = 2'-O-methylguanosine-3'-phosphate
  modified_base 18: mod_base = OTHER; note = 2'-O-methylguanosine-3'-phosphate
  modified_base 19: mod_base = OTHER; note = 2'-O-methyluridine-3'-phosphate
  modified_base 20: mod_base = OTHER; note = 2'-O-methylcytidine-3'-phosphate
  modified_base 21: mod_base = OTHER; note = 2'-O-methylcytidine-3'-phosphate
  modified_base 22: mod_base = OTHER; note = 2'-O-methylcytidine-3'-phosphate
  modified_base 23: mod_base = OTHER; note = 2'-O-methyladenosine
tagtgcccagaaagtgggtccca

SEQ ID NO: 4566 - RNA, 23 nt, synthetic construct
  source 1..23: mol_type = other RNA
  modified_base 1: mod_base = OTHER; note = 2'-O-methyluridine-3'-phosphate 5'phosphate
  modified_base 2: mod_base = OTHER; note = 2'-deoxy-2'-fluorocytidine-3'-phosphate
  modified_base 3: mod_base = OTHER; note = 2'-O-methyladenosine-3'-phosphate
  modified_base 4: mod_base = OTHER; note = 2'-O-methylguanosine-3'-phosphate
  modified_base 5: mod_base = OTHER; note = 2'-O-methyluridine-3'-phosphate
  modified_base 6: mod_base = OTHER; note = 2'-deoxy-2'-fluoroguanosine-3'-phosphate
  modified_base 7: mod_base = OTHER; note = 2'-O-methylcytidine-3'-phosphate
  modified_base 8: mod_base = OTHER; note = 2'-O-methylcytidine-3'-phosphate
  modified_base 9: mod_base = OTHER; note = 2'-O-methylcytidine-3'-phosphate
  modified_base 10: mod_base = OTHER; note = 2'-O-methyladenosine-3'-phosphate
  modified_base 11: mod_base = OTHER; note = 2'-O-methylguanosine-3'-phosphate
  modified_base 12: mod_base = OTHER; note = 2'-O-methyladenosine-3'-phosphate
  modified_base 13: mod_base = OTHER; note = 2'-O-methyladenosine-3'-phosphate
  modified_base 14: mod_base = OTHER; note = 2'-deoxy-2'-fluoroadenosine-3'-phosphate
  modified_base 15: mod_base = OTHER; note = 2'-O-methylguanosine-3'-phosphate
  modified_base 16: mod_base = OTHER; note = 2'-deoxy-2'-fluorouridine-3'-phosphate
  modified_base 17: mod_base = OTHER; note = 2'-O-methylguanosine-3'-phosphate
  modified_base 18: mod_base = OTHER; note = 2'-O-methylguanosine-3'-phosphate
  modified_base 19: mod_base = OTHER; note = 2'-O-methylguanosine-3'-phosphate
  modified_base 20: mod_base = OTHER; note = 2'-O-methyluridine-3'-phosphate
  modified_base 21: mod_base = OTHER; note = 2'-O-methylcytidine-3'-phosphate
  modified_base 22: mod_base = OTHER; note = 2'-O-methylcytidine-3'-phosphate
  modified_base 23: mod_base = OTHER; note = 2'-O-methylcytidine
tcagtgcccagaaagtgggtccc

SEQ ID NO: 4567 - RNA, 23 nt, synthetic construct
  source 1..23: mol_type = other RNA
  modified_base 1: mod_base = OTHER; note = 2'-O-methyluridine-3'-phosphate 5'phosphate
  modified_base 2: mod_base = OTHER; note = 2'-deoxy-2'-fluoroguanosine-3'-phosphate
  modified_base 3: mod_base = OTHER; note = 2'-O-methylcytidine-3'-phosphate
  modified_base 4: mod_base = OTHER; note = 2'-O-methyladenosine-3'-phosphate
  modified_base 5: mod_base = OTHER; note = 2'-O-methylguanosine-3'-phosphate
  modified_base 6: mod_base = OTHER; note = 2'-deoxy-2'-fluorouridine-3'-phosphate
  modified_base 7: mod_base = OTHER; note = 2'-O-methylguanosine-3'-phosphate
  modified_base 8: mod_base = OTHER; note = 2'-O-methylcytidine-3'-phosphate
  modified_base 9: mod_base = OTHER; note = 2'-O-methylcytidine-3'-phosphate
  modified_base 10: mod_base = OTHER; note = 2'-O-methylcytidine-3'-phosphate
  modified_base 11: mod_base = OTHER; note = 2'-O-methyladenosine-3'-phosphate
  modified_base 12: mod_base = OTHER; note = 2'-O-methylguanosine-3'-phosphate
  modified_base 13: mod_base = OTHER; note = 2'-O-methyladenosine-3'-phosphate
  modified_base 14: mod_base = OTHER; note = 2'-deoxy-2'-fluoroadenosine-3'-phosphate
  modified_base 15: mod_base = OTHER; note = 2'-O-methyladenosine-3'-phosphate
  modified_base 16: mod_base = OTHER; note = 2'-deoxy-2'-fluoroguanosine-3'-phosphate
  modified_base 17: mod_base = OTHER; note = 2'-O-methyluridine-3'-phosphate
  modified_base 18: mod_base = OTHER; note = 2'-O-methylguanosine-3'-phosphate
  modified_base 19: mod_base = OTHER; note = 2'-O-methylguanosine-3'-phosphate
  modified_base 20: mod_base = OTHER; note = 2'-O-methylguanosine-3'-phosphate
  modified_base 21: mod_base = OTHER; note = 2'-O-methyluridine-3'-phosphate
  modified_base 22: mod_base = OTHER; note = 2'-O-methylcytidine-3'-phosphate
  modified_base 23: mod_base = OTHER; note = 2'-O-methylcytidine
tgcagtgcccagaaagtgggtcc

SEQ ID NO: 4568 - RNA, 23 nt, synthetic construct
  source 1..23: mol_type = other RNA
  modified_base 1: mod_base = OTHER; note = 2'-O-methyluridine-3'-phosphate 5'phosphate
  modified_base 2: mod_base = OTHER; note = 2'-deoxy-2'-fluorouridine-3'-phosphate
  modified_base 3: mod_base = OTHER; note = 2'-O-methyladenosine-3'-phosphate
  modified_base 4: mod_base = OTHER; note = 2'-O-methyluridine-3'-phosphate
  modified_base 5: mod_base = OTHER; note = 2'-O-methylguanosine-3'-phosphate
  modified_base 6: mod_base = OTHER; note = 2'-deoxy-2'-fluorouridine-3'-phosphate
  modified_base 7: mod_base = OTHER; note = 2'-O-methyluridine-3'-phosphate
  modified_base 8: mod_base = OTHER; note = 2'-O-methylcytidine-3'-phosphate
  modified_base 9: mod_base = OTHER; note = 2'-O-methylcytidine-3'-phosphate
  modified_base 10: mod_base = OTHER; note = 2'-O-methyladenosine-3'-phosphate
  modified_base 11: mod_base = OTHER; note = 2'-O-methyluridine-3'-phosphate
  modified_base 12: mod_base = OTHER; note = 2'-O-methyluridine-3'-phosphate
  modified_base 13: mod_base = OTHER; note = 2'-O-methyluridine-3'-phosphate
  modified_base 14: mod_base = OTHER; note = 2'-deoxy-2'-fluorouridine-3'-phosphate
  modified_base 15: mod_base = OTHER; note = 2'-O-methylguanosine-3'-phosphate
  modified_base 16: mod_base = OTHER; note = 2'-deoxy-2'-fluoroguanosine-3'-phosphate
  modified_base 17: mod_base = OTHER; note = 2'-O-methylguanosine-3'-phosphate
  modified_base 18: mod_base = OTHER; note = 2'-O-methyladenosine-3'-phosphate
  modified_base 19: mod_base = OTHER; note = 2'-O-methylcytidine-3'-phosphate
  modified_base 20: mod_base = OTHER; note = 2'-O-methyluridine-3'-phosphate
  modified_base 21: mod_base = OTHER; note = 2'-O-methylguanosine-3'-phosphate
  modified_base 22: mod_base = OTHER; note = 2'-O-methylguanosine-3'-phosphate
  modified_base 23: mod_base = OTHER; note = 2'-O-methylcytidine
ttatgttccattttgggactggc

SEQ ID NO: 4569 - RNA, 23 nt, synthetic construct
  source 1..23: mol_type = other RNA
  modified_base 1: mod_base = OTHER; note = 2'-O-methyluridine-3'-phosphate 5'phosphate
  modified_base 2: mod_base = OTHER; note = 2'-deoxy-2'-fluorouridine-3'-phosphate
  modified_base 3: mod_base = OTHER; note = 2'-O-methyluridine-3'-phosphate
  modified_base 4: mod_base = OTHER; note = 2'-O-methyladenosine-3'-phosphate
  modified_base 5: mod_base = OTHER; note = 2'-O-methyluridine-3'-phosphate
  modified_base 6: mod_base = OTHER; note = 2'-deoxy-2'-fluoroguanosine-3'-phosphate
  modified_base 7: mod_base = OTHER; note = 2'-O-methyluridine-3'-phosphate
  modified_base 8: mod_base = OTHER; note = 2'-O-methyluridine-3'-phosphate
  modified_base 9: mod_base = OTHER; note = 2'-O-methylcytidine-3'-phosphate
  modified_base 10: mod_base = OTHER; note = 2'-O-methylcytidine-3'-phosphate
  modified_base 11: mod_base = OTHER; note = 2'-O-methyladenosine-3'-phosphate
  modified_base 12: mod_base = OTHER; note = 2'-O-methyluridine-3'-phosphate
  modified_base 13: mod_base = OTHER; note = 2'-O-methyluridine-3'-phosphate
  modified_base 14: mod_base = OTHER; note = 2'-deoxy-2'-fluorouridine-3'-phosphate
  modified_base 15: mod_base = OTHER; note = 2'-O-methyluridine-3'-phosphate
  modified_base 16: mod_base = OTHER; note = 2'-deoxy-2'-fluoroguanosine-3'-phosphate
  modified_base 17: mod_base = OTHER; note = 2'-O-methylguanosine-3'-phosphate
  modified_base 18: mod_base = OTHER; note = 2'-O-methylguanosine-3'-phosphate
  modified_base 19: mod_base = OTHER; note = 2'-O-methyladenosine-3'-phosphate
  modified_base 20: mod_base = OTHER; note = 2'-O-methylcytidine-3'-phosphate
  modified_base 21: mod_base = OTHER; note = 2'-O-methyluridine-3'-phosphate
  modified_base 22: mod_base = OTHER; note = 2'-O-methylguanosine-3'-phosphate
  modified_base 23: mod_base = OTHER; note = 2'-O-methylguanosine
tttatgttccattttgggactgg

SEQ ID NO: 4570 - RNA, 23 nt, synthetic construct
  source 1..23: mol_type = other RNA
  modified_base 1: mod_base = OTHER; note = 2'-O-methyluridine-3'-phosphate 5'phosphate
  modified_base 2: mod_base = OTHER; note = 2'-deoxy-2'-fluorocytidine-3'-phosphate
  modified_base 3: mod_base = OTHER; note = 2'-O-methyluridine-3'-phosphate
  modified_base 4: mod_base = OTHER; note = 2'-O-methyluridine-3'-phosphate
  modified_base 5: mod_base = OTHER; note = 2'-O-methyladenosine-3'-phosphate
  modified_base 6: mod_base = OTHER; note = 2'-deoxy-2'-fluorouridine-3'-phosphate
  modified_base 7: mod_base = OTHER; note = 2'-O-methylguanosine-3'-phosphate
  modified_base 8: mod_base = OTHER; note = 2'-O-methyluridine-3'-phosphate
  modified_base 9: mod_base = OTHER; note = 2'-O-methyluridine-3'-phosphate
  modified_base 10: mod_base = OTHER; note = 2'-O-methylcytidine-3'-phosphate
  modified_base 11: mod_base = OTHER; note = 2'-O-methylcytidine-3'-phosphate
  modified_base 12: mod_base = OTHER; note = 2'-O-methyladenosine-3'-phosphate
  modified_base 13: mod_base = OTHER; note = 2'-O-methyluridine-3'-phosphate
  modified_base 14: mod_base = OTHER; note = 2'-deoxy-2'-fluorouridine-3'-phosphate
  modified_base 15: mod_base = OTHER; note = 2'-O-methyluridine-3'-phosphate
  modified_base 16: mod_base = OTHER; note = 2'-deoxy-2'-fluorouridine-3'-phosphate
  modified_base 17: mod_base = OTHER; note = 2'-O-methylguanosine-3'-phosphate
  modified_base 18: mod_base = OTHER; note = 2'-O-methylguanosine-3'-phosphate
  modified_base 19: mod_base = OTHER; note = 2'-O-methylguanosine-3'-phosphate
  modified_base 20: mod_base = OTHER; note = 2'-O-methyladenosine-3'-phosphate
  modified_base 21: mod_base = OTHER; note = 2'-O-methylcytidine-3'-phosphate
  modified_base 22: mod_base = OTHER; note = 2'-O-methyluridine-3'-phosphate
  modified_base 23: mod_base = OTHER; note = 2'-O-methylguanosine
tcttatgttccattttgggactg

SEQ ID NO: 4571 - RNA, 23 nt, synthetic construct
  source 1..23: mol_type = other RNA
  modified_base 1: mod_base = OTHER; note = 2'-O-methyluridine-3'-phosphate 5'phosphate
  modified_base 2: mod_base = OTHER; note = 2'-deoxy-2'-fluorocytidine-3'-phosphate
  modified_base 3: mod_base = OTHER; note = 2'-O-methylcytidine-3'-phosphate
  modified_base 4: mod_base = OTHER; note = 2'-O-methyluridine-3'-phosphate
  modified_base 5: mod_base = OTHER; note = 2'-O-methyluridine-3'-phosphate
  modified_base 6: mod_base = OTHER; note = 2'-deoxy-2'-fluoroadenosine-3'-phosphate
  modified_base 7: mod_base = OTHER; note = 2'-O-methyluridine-3'-phosphate
  modified_base 8: mod_base = OTHER; note = 2'-O-methylguanosine-3'-phosphate
  modified_base 9: mod_base = OTHER; note = 2'-O-methyluridine-3'-phosphate
  modified_base 10: mod_base = OTHER; note = 2'-O-methyluridine-3'-phosphate
  modified_base 11: mod_base = OTHER; note = 2'-O-methylcytidine-3'-phosphate
  modified_base 12: mod_base = OTHER; note = 2'-O-methylcytidine-3'-phosphate
  modified_base 13: mod_base = OTHER; note = 2'-O-methyladenosine-3'-phosphate
  modified_base 14: mod_base = OTHER; note = 2'-deoxy-2'-fluorouridine-3'-phosphate
  modified_base 15: mod_base = OTHER; note = 2'-O-methyluridine-3'-phosphate
  modified_base 16: mod_base = OTHER; note = 2'-deoxy-2'-fluorouridine-3'-phosphate
  modified_base 17: mod_base = OTHER; note = 2'-O-methyluridine-3'-phosphate
  modified_base 18: mod_base = OTHER; note = 2'-O-methylguanosine-3'-phosphate
  modified_base 19: mod_base = OTHER; note = 2'-O-methylguanosine-3'-phosphate
  modified_base 20: mod_base = OTHER; note = 2'-O-methylguanosine-3'-phosphate
  modified_base 21: mod_base = OTHER; note = 2'-O-methyladenosine-3'-phosphate
  modified_base 22: mod_base = OTHER; note = 2'-O-methylcytidine-3'-phosphate
  modified_base 23: mod_base = OTHER; note = 2'-O-methyluridine
tccttatgttccattttgggact

SEQ ID NO: 4572 - RNA, 23 nt, synthetic construct
  source 1..23: mol_type = other RNA
  modified_base 1: mod_base = OTHER; note = 2'-O-methyluridine-3'-phosphate 5'phosphate
  modified_base 2: mod_base = OTHER; note = 2'-deoxy-2'-fluorouridine-3'-phosphate
  modified_base 3: mod_base = OTHER; note = 2'-O-methylcytidine-3'-phosphate
  modified_base 4: mod_base = OTHER; note = 2'-O-methylcytidine-3'-phosphate
  modified_base 5: mod_base = OTHER; note = 2'-O-methyluridine-3'-phosphate
  modified_base 6: mod_base = OTHER; note = 2'-deoxy-2'-fluorouridine-3'-phosphate
  modified_base 7: mod_base = OTHER; note = 2'-O-methyladenosine-3'-phosphate
  modified_base 8: mod_base = OTHER; note = 2'-O-methyluridine-3'-phosphate
  modified_base 9: mod_base = OTHER; note = 2'-O-methylguanosine-3'-phosphate
  modified_base 10: mod_base = OTHER; note = 2'-O-methyluridine-3'-phosphate
  modified_base 11: mod_base = OTHER; note = 2'-O-methyluridine-3'-phosphate
  modified_base 12: mod_base = OTHER; note = 2'-O-methylcytidine-3'-phosphate
  modified_base 13: mod_base = OTHER; note = 2'-O-methylcytidine-3'-phosphate
  modified_base 14: mod_base = OTHER; note = 2'-deoxy-2'-fluoroadenosine-3'-phosphate
  modified_base 15: mod_base = OTHER; note = 2'-O-methyluridine-3'-phosphate
  modified_base 16: mod_base = OTHER; note = 2'-deoxy-2'-fluorouridine-3'-phosphate
  modified_base 17: mod_base = OTHER; note = 2'-O-methyluridine-3'-phosphate
  modified_base 18: mod_base = OTHER; note = 2'-O-methyluridine-3'-phosphate
  modified_base 19: mod_base = OTHER; note = 2'-O-methylguanosine-3'-phosphate
  modified_base 20: mod_base = OTHER; note = 2'-O-methylguanosine-3'-phosphate
  modified_base 21: mod_base = OTHER; note = 2'-O-methylguanosine-3'-phosphate
  modified_base 22: mod_base = OTHER; note = 2'-O-methyladenosine-3'-phosphate
  modified_base 23: mod_base = OTHER; note = 2'-O-methylcytidine
ttccttatgttccattttgggac

SEQ ID NO: 4573 - RNA, 23 nt, synthetic construct
  source 1..23: mol_type = other RNA
  modified_base 1: mod_base = OTHER; note = 2'-O-methyluridine-3'-phosphate 5'phosphate
  modified_base 2: mod_base = OTHER; note = 2'-deoxy-2'-fluorouridine-3'-phosphate
  modified_base 3: mod_base = OTHER; note = 2'-O-methyluridine-3'-phosphate
  modified_base 4: mod_base = OTHER; note = 2'-O-methylcytidine-3'-phosphate
  modified_base 5: mod_base = OTHER; note = 2'-O-methylcytidine-3'-phosphate
  modified_base 6: mod_base = OTHER; note = 2'-deoxy-2'-fluorouridine-3'-phosphate
  modified_base 7: mod_base = OTHER; note = 2'-O-methyluridine-3'-phosphate
  modified_base 8: mod_base = OTHER; note = 2'-O-methyladenosine-3'-phosphate
  modified_base 9: mod_base = OTHER; note = 2'-O-methyluridine-3'-phosphate
  modified_base 10: mod_base = OTHER; note = 2'-O-methylguanosine-3'-phosphate
  modified_base 11: mod_base = OTHER; note = 2'-O-methyluridine-3'-phosphate
  modified_base 12: mod_base = OTHER; note = 2'-O-methyluridine-3'-phosphate
  modified_base 13: mod_base = OTHER; note = 2'-O-methylcytidine-3'-phosphate
  modified_base 14: mod_base = OTHER; note = 2'-deoxy-2'-fluorocytidine-3'-phosphate
  modified_base 15: mod_base = OTHER; note = 2'-O-methyladenosine-3'-phosphate
  modified_base 16: mod_base = OTHER; note = 2'-deoxy-2'-fluorouridine-3'-phosphate
  modified_base 17: mod_base = OTHER; note = 2'-O-methyluridine-3'-phosphate
  modified_base 18: mod_base = OTHER; note = 2'-O-methyluridine-3'-phosphate
  modified_base 19: mod_base = OTHER; note = 2'-O-methyluridine-3'-phosphate
  modified_base 20: mod_base = OTHER; note = 2'-O-methylguanosine-3'-phosphate
  modified_base 21: mod_base = OTHER; note = 2'-O-methylguanosine-3'-phosphate
  modified_base 22: mod_base = OTHER; note = 2'-O-methylguanosine-3'-phosphate
  modified_base 23: mod_base = OTHER; note = 2'-O-methyladenosine
tttccttatgttccattttggga

SEQ ID NO: 4574 - RNA, 23 nt, synthetic construct
  source 1..23: mol_type = other RNA
  modified_base 1: mod_base = OTHER; note = 2'-O-methyluridine-3'-phosphate 5'phosphate
  modified_base 2: mod_base = OTHER; note = 2'-deoxy-2'-fluorocytidine-3'-phosphate
  modified_base 3: mod_base = OTHER; note = 2'-O-methyluridine-3'-phosphate
  modified_base 4: mod_base = OTHER; note = 2'-O-methyluridine-3'-phosphate
  modified_base 5: mod_base = OTHER; note = 2'-O-methylcytidine-3'-phosphate
  modified_base 6: mod_base = OTHER; note = 2'-deoxy-2'-fluorocytidine-3'-phosphate
  modified_base 7: mod_base = OTHER; note = 2'-O-methyluridine-3'-phosphate
  modified_base 8: mod_base = OTHER; note = 2'-O-methyluridine-3'-phosphate
  modified_base 9: mod_base = OTHER; note = 2'-O-methyladenosine-3'-phosphate
  modified_base 10: mod_base = OTHER; note = 2'-O-methyluridine-3'-phosphate
  modified_base 11: mod_base = OTHER; note = 2'-O-methylguanosine-3'-phosphate
  modified_base 12: mod_base = OTHER; note = 2'-O-methyluridine-3'-phosphate
  modified_base 13: mod_base = OTHER; note = 2'-O-methyluridine-3'-phosphate
  modified_base 14: mod_base = OTHER; note = 2'-deoxy-2'-fluorocytidine-3'-phosphate
  modified_base 15: mod_base = OTHER; note = 2'-O-methylcytidine-3'-phosphate
  modified_base 16: mod_base = OTHER; note = 2'-deoxy-2'-fluoroadenosine-3'-phosphate
  modified_base 17: mod_base = OTHER; note = 2'-O-methyluridine-3'-phosphate
  modified_base 18: mod_base = OTHER; note = 2'-O-methyluridine-3'-phosphate
  modified_base 19: mod_base = OTHER; note = 2'-O-methyluridine-3'-phosphate
  modified_base 20: mod_base = OTHER; note = 2'-O-methyluridine-3'-phosphate
  modified_base 21: mod_base = OTHER; note = 2'-O-methylguanosine-3'-phosphate
  modified_base 22: mod_base = OTHER; note = 2'-O-methylguanosine-3'-phosphate
  modified_base 23: mod_base = OTHER; note = 2'-O-methylguanosine
tcttccttatgttccattttggg

SEQ ID NO: 4575 - RNA, 23 nt, synthetic construct
  source 1..23: mol_type = other RNA
  modified_base 1: mod_base = OTHER; note = 2'-O-methyluridine-3'-phosphate 5'phosphate
  modified_base 2: mod_base = OTHER; note = 2'-deoxy-2'-fluoroadenosine-3'-phosphate
  modified_base 3: mod_base = OTHER; note = 2'-O-methylcytidine-3'-phosphate
  modified_base 4: mod_base = OTHER; note = 2'-O-methyluridine-3'-phosphate
  modified_base 5: mod_base = OTHER; note = 2'-O-methyluridine-3'-phosphate
  modified_base 6: mod_base = OTHER; note = 2'-deoxy-2'-fluorocytidine-3'-phosphate
  modified_base 7: mod_base = OTHER; note = 2'-O-methylcytidine-3'-phosphate
  modified_base 8: mod_base = OTHER; note = 2'-O-methyluridine-3'-phosphate
  modified_base 9: mod_base = OTHER; note = 2'-O-methyluridine-3'-phosphate
  modified_base 10: mod_base = OTHER; note = 2'-O-methyladenosine-3'-phosphate
  modified_base 11: mod_base = OTHER; note = 2'-O-methyluridine-3'-phosphate
  modified_base 12: mod_base = OTHER; note = 2'-O-methylguanosine-3'-phosphate
  modified_base 13: mod_base = OTHER; note = 2'-O-methyluridine-3'-phosphate
  modified_base 14: mod_base = OTHER; note = 2'-deoxy-2'-fluorouridine-3'-phosphate
  modified_base 15: mod_base = OTHER; note = 2'-O-methylcytidine-3'-phosphate
  modified_base 16: mod_base = OTHER; note = 2'-deoxy-2'-fluorocytidine-3'-phosphate
  modified_base 17: mod_base = OTHER; note = 2'-O-methyladenosine-3'-phosphate
  modified_base 18: mod_base = OTHER; note = 2'-O-methyluridine-3'-phosphate
  modified_base 19: mod_base = OTHER; note = 2'-O-methyluridine-3'-phosphate
  modified_base 20: mod_base = OTHER; note = 2'-O-methyluridine-3'-phosphate
  modified_base 21: mod_base = OTHER; note = 2'-O-methyluridine-3'-phosphate
  modified_base 22: mod_base = OTHER; note = 2'-O-methylguanosine-3'-phosphate
  modified_base 23: mod_base = OTHER; note = 2'-O-methylguanosine
tacttccttatgttccattttgg

SEQ ID NO: 4576 - RNA, 23 nt, synthetic construct
  source 1..23: mol_type = other RNA
  modified_base 1: mod_base = OTHER; note = 2'-O-methyluridine-3'-phosphate 5'phosphate
  modified_base 2: mod_base = OTHER; note = 2'-deoxy-2'-fluorocytidine-3'-phosphate
  modified_base 3: mod_base = OTHER; note = 2'-O-methyladenosine-3'-phosphate
  modified_base 4: mod_base = OTHER; note = 2'-O-methylcytidine-3'-phosphate
  modified_base 5: mod_base = OTHER; note = 2'-O-methyluridine-3'-phosphate
  modified_base 6: mod_base = OTHER; note = 2'-deoxy-2'-fluorouridine-3'-phosphate
  modified_base 7: mod_base = OTHER; note = 2'-O-methylcytidine-3'-phosphate
  modified_base 8: mod_base = OTHER; note = 2'-O-methylcytidine-3'-phosphate
  modified_base 9: mod_base = OTHER; note = 2'-O-methyluridine-3'-phosphate
  modified_base 10: mod_base = OTHER; note = 2'-O-methyluridine-3'-phosphate
  modified_base 11: mod_base = OTHER; note = 2'-O-methyladenosine-3'-phosphate
  modified_base 12: mod_base = OTHER; note = 2'-O-methyluridine-3'-phosphate
  modified_base 13: mod_base = OTHER; note = 2'-O-methylguanosine-3'-phosphate
  modified_base 14: mod_base = OTHER; note = 2'-deoxy-2'-fluorouridine-3'-phosphate
  modified_base 15: mod_base = OTHER; note = 2'-O-methyluridine-3'-phosphate
  modified_base 16: mod_base = OTHER; note = 2'-deoxy-2'-fluorocytidine-3'-phosphate
  modified_base 17: mod_base = OTHER; note = 2'-O-methylcytidine-3'-phosphate
  modified_base 18: mod_base = OTHER; note = 2'-O-methyladenosine-3'-phosphate
  modified_base 19: mod_base = OTHER; note = 2'-O-methyluridine-3'-phosphate
  modified_base 20: mod_base = OTHER; note = 2'-O-methyluridine-3'-phosphate
  modified_base 21: mod_base = OTHER; note = 2'-O-methyluridine-3'-phosphate
  modified_base 22: mod_base = OTHER; note = 2'-O-methyluridine-3'-phosphate
  modified_base 23: mod_base = OTHER; note = 2'-O-methylguanosine
tcacttccttatgttccattttg

SEQ ID NO: 4577 - RNA, 23 nt, synthetic construct
  source 1..23: mol_type = other RNA
  modified_base 1: mod_base = OTHER; note = 2'-O-methyluridine-3'-phosphate 5'phosphate
  modified_base 2: mod_base = OTHER; note = 2'-deoxy-2'-fluorocytidine-3'-phosphate
  modified_base 3: mod_base = OTHER; note = 2'-O-methylcytidine-3'-phosphate
  modified_base 4: mod_base = OTHER; note = 2'-O-methyladenosine-3'-phosphate
  modified_base 5: mod_base = OTHER; note = 2'-O-methylcytidine-3'-phosphate
  modified_base 6: mod_base = OTHER; note = 2'-deoxy-2'-fluorouridine-3'-phosphate
  modified_base 7: mod_base = OTHER; note = 2'-O-methyluridine-3'-phosphate
  modified_base 8: mod_base = OTHER; note = 2'-O-methylcytidine-3'-phosphate
  modified_base 9: mod_base = OTHER; note = 2'-O-methylcytidine-3'-phosphate
  modified_base 10: mod_base = OTHER; note = 2'-O-methyluridine-3'-phosphate
  modified_base 11: mod_base = OTHER; note = 2'-O-methyluridine-3'-phosphate
  modified_base 12: mod_base = OTHER; note = 2'-O-methyladenosine-3'-phosphate
  modified_base 13: mod_base = OTHER; note = 2'-O-methyluridine-3'-phosphate
  modified_base 14: mod_base = OTHER; note = 2'-deoxy-2'-fluoroguanosine-3'-phosphate
  modified_base 15: mod_base = OTHER; note = 2'-O-methyluridine-3'-phosphate
  modified_base 16: mod_base = OTHER; note = 2'-deoxy-2'-fluorouridine-3'-phosphate
  modified_base 17: mod_base = OTHER; note = 2'-O-methylcytidine-3'-phosphate
  modified_base 18: mod_base = OTHER; note = 2'-O-methylcytidine-3'-phosphate
  modified_base 19: mod_base = OTHER; note = 2'-O-methyladenosine-3'-phosphate
  modified_base 20: mod_base = OTHER; note = 2'-O-methyluridine-3'-phosphate
  modified_base 21: mod_base = OTHER; note = 2'-O-methyluridine-3'-phosphate
  modified_base 22: mod_base = OTHER; note = 2'-O-methyluridine-3'-phosphate
  modified_base 23: mod_base = OTHER; note = 2'-O-methyluridine
tccacttccttatgttccatttt

SEQ ID NO: 4578 - RNA, 23 nt, synthetic construct
  source 1..23: mol_type = other RNA
  modified_base 1: mod_base = OTHER; note = 2'-O-methyluridine-3'-phosphate 5'phosphate
  modified_base 2: mod_base = OTHER; note = 2'-deoxy-2'-fluoroadenosine-3'-phosphate
  modified_base 3: mod_base = OTHER; note = 2'-O-methylcytidine-3'-phosphate
  modified_base 4: mod_base = OTHER; note = 2'-O-methylcytidine-3'-phosphate
  modified_base 5: mod_base = OTHER; note = 2'-O-methyladenosine-3'-phosphate
  modified_base 6: mod_base = OTHER; note = 2'-deoxy-2'-fluorocytidine-3'-phosphate
  modified_base 7: mod_base = OTHER; note = 2'-O-methyluridine-3'-phosphate
  modified_base 8: mod_base = OTHER; note = 2'-O-methyluridine-3'-phosphate
  modified_base 9: mod_base = OTHER; note = 2'-O-methylcytidine-3'-phosphate
  modified_base 10: mod_base = OTHER; note = 2'-O-methylcytidine-3'-phosphate
  modified_base 11: mod_base = OTHER; note = 2'-O-methyluridine-3'-phosphate
  modified_base 12: mod_base = OTHER; note = 2'-O-methyluridine-3'-phosphate
  modified_base 13: mod_base = OTHER; note = 2'-O-methyladenosine-3'-phosphate
  modified_base 14: mod_base = OTHER; note = 2'-deoxy-2'-fluorouridine-3'-phosphate
  modified_base 15: mod_base = OTHER; note = 2'-O-methylguanosine-3'-phosphate
  modified_base 16: mod_base = OTHER; note = 2'-deoxy-2'-fluorouridine-3'-phosphate
  modified_base 17: mod_base = OTHER; note = 2'-O-methyluridine-3'-phosphate
  modified_base 18: mod_base = OTHER; note = 2'-O-methylcytidine-3'-phosphate
  modified_base 19: mod_base = OTHER; note = 2'-O-methylcytidine-3'-phosphate
  modified_base 20: mod_base = OTHER; note = 2'-O-methyladenosine-3'-phosphate
  modified_base 21: mod_base = OTHER; note = 2'-O-methyluridine-3'-phosphate
  modified_base 22: mod_base = OTHER; note = 2'-O-methyluridine-3'-phosphate
  modified_base 23: mod_base = OTHER; note = 2'-O-methyluridine
taccacttccttatgttccattt

SEQ ID NO: 4579 - RNA, 23 nt, synthetic construct
  source 1..23: mol_type = other RNA
  modified_base 1: mod_base = OTHER; note = 2'-O-methyluridine-3'-phosphate 5'phosphate
  modified_base 2: mod_base = OTHER; note = 2'-deoxy-2'-fluoroadenosine-3'-phosphate
  modified_base 3: mod_base = OTHER; note = 2'-O-methyladenosine-3'-phosphate
  modified_base 4: mod_base = OTHER; note = 2'-O-methylcytidine-3'-phosphate
  modified_base 5: mod_base = OTHER; note = 2'-O-methylcytidine-3'-phosphate
  modified_base 6: mod_base = OTHER; note = 2'-deoxy-2'-fluoroadenosine-3'-phosphate
  modified_base 7: mod_base = OTHER; note = 2'-O-methylcytidine-3'-phosphate
  modified_base 8: mod_base = OTHER; note = 2'-O-methyluridine-3'-phosphate
  modified_base 9: mod_base = OTHER; note = 2'-O-methyluridine-3'-phosphate
  modified_base 10: mod_base = OTHER; note = 2'-O-methylcytidine-3'-phosphate
  modified_base 11: mod_base = OTHER; note = 2'-O-methylcytidine-3'-phosphate
  modified_base 12: mod_base = OTHER; note = 2'-O-methyluridine-3'-phosphate
  modified_base 13: mod_base = OTHER; note = 2'-O-methyluridine-3'-phosphate
  modified_base 14: mod_base = OTHER; note = 2'-deoxy-2'-fluoroadenosine-3'-phosphate
  modified_base 15: mod_base = OTHER; note = 2'-O-methyluridine-3'-phosphate
  modified_base 16: mod_base = OTHER; note = 2'-deoxy-2'-fluoroguanosine-3'-phosphate
  modified_base 17: mod_base = OTHER; note = 2'-O-methyluridine-3'-phosphate
  modified_base 18: mod_base = OTHER; note = 2'-O-methyluridine-3'-phosphate
  modified_base 19: mod_base = OTHER; note = 2'-O-methylcytidine-3'-phosphate
  modified_base 20: mod_base = OTHER; note = 2'-O-methylcytidine-3'-phosphate
  modified_base 21: mod_base = OTHER; note = 2'-O-methyladenosine-3'-phosphate
  modified_base 22: mod_base = OTHER; note = 2'-O-methyluridine-3'-phosphate
  modified_base 23: mod_base = OTHER; note = 2'-O-methyluridine
taaccacttccttatgttccatt

SEQ ID NO: 4580 - RNA, 23 nt, synthetic construct
  source 1..23: mol_type = other RNA
  modified_base 1: mod_base = OTHER; note = 2'-O-methyluridine-3'-phosphate 5'phosphate
  modified_base 2: mod_base = OTHER; note = 2'-deoxy-2'-fluorouridine-3'-phosphate
  modified_base 3: mod_base = OTHER; note = 2'-O-methyluridine-3'-phosphate
  modified_base 4: mod_base = OTHER; note = 2'-O-methylcytidine-3'-phosphate
  modified_base 5: mod_base = OTHER; note = 2'-O-methyladenosine-3'-phosphate
  modified_base 6: mod_base = OTHER; note = 2'-deoxy-2'-fluorocytidine-3'-phosphate
  modified_base 7: mod_base = OTHER; note = 2'-O-methyladenosine-3'-phosphate
  modified_base 8: mod_base = OTHER; note = 2'-O-methyluridine-3'-phosphate
  modified_base 9: mod_base = OTHER; note = 2'-O-methyladenosine-3'-phosphate
  modified_base 10: mod_base = OTHER; note = 2'-O-methylguanosine-3'-phosphate
  modified_base 11: mod_base = OTHER; note = 2'-O-methyluridine-3'-phosphate
  modified_base 12: mod_base = OTHER; note = 2'-O-methylcytidine-3'-phosphate
  modified_base 13: mod_base = OTHER; note = 2'-O-methyladenosine-3'-phosphate
  modified_base 14: mod_base = OTHER; note = 2'-deoxy-2'-fluorouridine-3'-phosphate
  modified_base 15: mod_base = OTHER; note = 2'-O-methylcytidine-3'-phosphate
  modified_base 16: mod_base = OTHER; note = 2'-deoxy-2'-fluorocytidine-3'-phosphate
  modified_base 17: mod_base = OTHER; note = 2'-O-methyladenosine-3'-phosphate
  modified_base 18: mod_base = OTHER; note = 2'-O-methylguanosine-3'-phosphate
  modified_base 19: mod_base = OTHER; note = 2'-O-methyladenosine-3'-phosphate
  modified_base 20: mod_base = OTHER; note = 2'-O-methylguanosine-3'-phosphate
  modified_base 21: mod_base = OTHER; note = 2'-O-methylguanosine-3'-phosphate
  modified_base 22: mod_base = OTHER; note = 2'-O-methylcytidine-3'-phosphate
  modified_base 23: mod_base = OTHER; note = 2'-O-methyluridine
tttcacatagtcatccagaggct

SEQ ID NO: 4581 - RNA, 23 nt, synthetic construct
  source 1..23: mol_type = other RNA
  modified_base 1: mod_base = OTHER; note = 2'-O-methyluridine-3'-phosphate 5'phosphate
  modified_base 2: mod_base = OTHER; note = 2'-deoxy-2'-fluorocytidine-3'-phosphate
  modified_base 3: mod_base = OTHER; note = 2'-O-methyluridine-3'-phosphate
  modified_base 4: mod_base = OTHER; note = 2'-O-methylguanosine-3'-phosphate
  modified_base 5: mod_base = OTHER; note = 2'-O-methylcytidine-3'-phosphate
  modified_base 6: mod_base = OTHER; note = 2'-deoxy-2'-fluorouridine-3'-phosphate
  modified_base 7: mod_base = OTHER; note = 2'-O-methylcytidine-3'-phosphate
  modified_base 8: mod_base = OTHER; note = 2'-O-methylcytidine-3'-phosphate
  modified_base 9: mod_base = OTHER; note = 2'-O-methylcytidine-3'-phosphate
  modified_base 10: mod_base = OTHER; note = 2'-O-methyladenosine-3'-phosphate
  modified_base 11: mod_base = OTHER; note = 2'-O-methylguanosine-3'-phosphate
  modified_base 12: mod_base = OTHER; note = 2'-O-methylcytidine-3'-phosphate
  modified_base 13: mod_base = OTHER; note = 2'-O-methyluridine-3'-phosphate
  modified_base 14: mod_base = OTHER; note = 2'-deoxy-2'-fluoroguanosine-3'-phosphate
  modified_base 15: mod_base = OTHER; note = 2'-O-methylcytidine-3'-phosphate
  modified_base 16: mod_base = OTHER; note = 2'-deoxy-2'-fluorouridine-3'-phosphate
  modified_base 17: mod_base = OTHER; note = 2'-O-methyluridine-3'-phosphate
  modified_base 18: mod_base = OTHER; note = 2'-O-methylcytidine-3'-phosphate
  modified_base 19: mod_base = OTHER; note = 2'-O-methyluridine-3'-phosphate
  modified_base 20: mod_base = OTHER; note = 2'-O-methyluridine-3'-phosphate
  modified_base 21: mod_base = OTHER; note = 2'-O-methyladenosine-3'-phosphate
  modified_base 22: mod_base = OTHER; note = 2'-O-methylguanosine-3'-phosphate
  modified_base 23: mod_base = OTHER; note = 2'-O-methyluridine
tctgctcccagctgcttcttagt

SEQ ID NO: 4582 - RNA, 23 nt, synthetic construct
  source 1..23: mol_type = other RNA
  modified_base 1: mod_base = OTHER; note = 2'-O-methyluridine-3'-phosphate 5'phosphate
  modified_base 2: mod_base = OTHER; note = 2'-deoxy-2'-fluoroadenosine-3'-phosphate
  modified_base 3: mod_base = OTHER; note = 2'-O-methylcytidine-3'-phosphate
  modified_base 4: mod_base = OTHER; note = 2'-O-methyluridine-3'-phosphate
  modified_base 5: mod_base = OTHER; note = 2'-O-methyluridine-3'-phosphate
  modified_base 6: mod_base = OTHER; note = 2'-deoxy-2'-fluorocytidine-3'-phosphate
  modified_base 7: mod_base = OTHER; note = 2'-O-methylcytidine-3'-phosphate
  modified_base 8: mod_base = OTHER; note = 2'-O-methyluridine-3'-phosphate
  modified_base 9: mod_base = OTHER; note = 2'-O-methylguanosine-3'-phosphate
  modified_base 10: mod_base = OTHER; note = 2'-O-methylcytidine-3'-phosphate
  modified_base 11: mod_base = OTHER; note = 2'-O-methyluridine-3'-phosphate
  modified_base 12: mod_base = OTHER; note = 2'-O-methylcytidine-3'-phosphate
  modified_base 13: mod_base = OTHER; note = 2'-O-methylcytidine-3'-phosphate
  modified_base 14: mod_base = OTHER; note = 2'-deoxy-2'-fluorocytidine-3'-phosphate
  modified_base 15: mod_base = OTHER; note = 2'-O-methyladenosine-3'-phosphate
  modified_base 16: mod_base = OTHER; note = 2'-deoxy-2'-fluoroguanosine-3'-phosphate
  modified_base 17: mod_base = OTHER; note = 2'-O-methylcytidine-3'-phosphate
  modified_base 18: mod_base = OTHER; note = 2'-O-methyluridine-3'-phosphate
  modified_base 19: mod_base = OTHER; note = 2'-O-methylguanosine-3'-phosphate
  modified_base 20: mod_base = OTHER; note = 2'-O-methylcytidine-3'-phosphate
  modified_base 21: mod_base = OTHER; note = 2'-O-methyluridine-3'-phosphate
  modified_base 22: mod_base = OTHER; note = 2'-O-methyluridine-3'-phosphate
  modified_base 23: mod_base = OTHER; note = 2'-O-methylcytidine
tacttcctgctcccagctgcttc

SEQ ID NO: 4583 - RNA, 23 nt, synthetic construct
  source 1..23: mol_type = other RNA
  modified_base 1: mod_base = OTHER; note = 2'-O-methyluridine-3'-phosphate 5'phosphate
  modified_base 2: mod_base = OTHER; note = 2'-deoxy-2'-fluorouridine-3'-phosphate
  modified_base 3: mod_base = OTHER; note = 2'-O-methyladenosine-3'-phosphate
  modified_base 4: mod_base = OTHER; note = 2'-O-methyluridine-3'-phosphate
  modified_base 5: mod_base = OTHER; note = 2'-O-methyladenosine-3'-phosphate
  modified_base 6: mod_base = OTHER; note = 2'-deoxy-2'-fluorocytidine-3'-phosphate
  modified_base 7: mod_base = OTHER; note = 2'-O-methyluridine-3'-phosphate
  modified_base 8: mod_base = OTHER; note = 2'-O-methyluridine-3'-phosphate
  modified_base 9: mod_base = OTHER; note = 2'-O-methylcytidine-3'-phosphate
  modified_base 10: mod_base = OTHER; note = 2'-O-methylcytidine-3'-phosphate
  modified_base 11: mod_base = OTHER; note = 2'-O-methyluridine-3'-phosphate
  modified_base 12: mod_base = OTHER; note = 2'-O-methylguanosine-3'-phosphate
  modified_base 13: mod_base = OTHER; note = 2'-O-methylcytidine-3'-phosphate
  modified_base 14: mod_base = OTHER; note = 2'-deoxy-2'-fluorouridine-3'-phosphate
  modified_base 15: mod_base = OTHER; note = 2'-O-methylcytidine-3'-phosphate
  modified_base 16: mod_base = OTHER; note = 2'-deoxy-2'-fluorocytidine-3'-phosphate
  modified_base 17: mod_base = OTHER; note = 2'-O-methylcytidine-3'-phosphate
  modified_base 18: mod_base = OTHER; note = 2'-O-methyladenosine-3'-phosphate
  modified_base 19: mod_base = OTHER; note = 2'-O-methylguanosine-3'-phosphate
  modified_base 20: mod_base = OTHER; note = 2'-O-methylcytidine-3'-phosphate
  modified_base 21: mod_base = OTHER; note = 2'-O-methyluridine-3'-phosphate
  modified_base 22: mod_base = OTHER; note = 2'-O-methylguanosine-3'-phosphate
  modified_base 23: mod_base = OTHER; note = 2'-O-methylcytidine
ttatacttcctgctcccagctgc

SEQ ID NO: 4584 - RNA, 23 nt, synthetic construct
  source 1..23: mol_type = other RNA
  modified_base 1: mod_base = OTHER; note = 2'-O-methyluridine-3'-phosphate 5'phosphate
  modified_base 2: mod_base = OTHER; note = 2'-deoxy-2'-fluorouridine-3'-phosphate
  modified_base 3: mod_base = OTHER; note = 2'-O-methylcytidine-3'-phosphate
  modified_base 4: mod_base = OTHER; note = 2'-O-methyluridine-3'-phosphate
  modified_base 5: mod_base = OTHER; note = 2'-O-methyladenosine-3'-phosphate
  modified_base 6: mod_base = OTHER; note = 2'-deoxy-2'-fluorouridine-3'-phosphate
  modified_base 7: mod_base = OTHER; note = 2'-O-methyladenosine-3'-phosphate
  modified_base 8: mod_base = OTHER; note = 2'-O-methylcytidine-3'-phosphate
  modified_base 9: mod_base = OTHER; note = 2'-O-methyluridine-3'-phosphate
  modified_base 10: mod_base = OTHER; note = 2'-O-methyluridine-3'-phosphate
  modified_base 11: mod_base = OTHER; note = 2'-O-methylcytidine-3'-phosphate
  modified_base 12: mod_base = OTHER; note = 2'-O-methylcytidine-3'-phosphate
  modified_base 13: mod_base = OTHER; note = 2'-O-methyluridine-3'-phosphate
  modified_base 14: mod_base = OTHER; note = 2'-deoxy-2'-fluoroguanosine-3'-phosphate
  modified_base 15: mod_base = OTHER; note = 2'-O-methylcytidine-3'-phosphate
  modified_base 16: mod_base = OTHER; note = 2'-deoxy-2'-fluorouridine-3'-phosphate
  modified_base 17: mod_base = OTHER; note = 2'-O-methylcytidine-3'-phosphate
  modified_base 18: mod_base = OTHER; note = 2'-O-methylcytidine-3'-phosphate
  modified_base 19: mod_base = OTHER; note = 2'-O-methylcytidine-3'-phosphate
  modified_base 20: mod_base = OTHER; note = 2'-O-methyladenosine-3'-phosphate
  modified_base 21: mod_base = OTHER; note = 2'-O-methylguanosine-3'-phosphate
  modified_base 22: mod_base = OTHER; note = 2'-O-methylcytidine-3'-phosphate
  modified_base 23: mod_base = OTHER; note = 2'-O-methyluridine
ttctatacttcctgctcccagct

SEQ ID NO: 4585 - RNA, 23 nt, synthetic construct
  source 1..23: mol_type = other RNA
  modified_base 1: mod_base = OTHER; note = 2'-O-methyluridine-3'-phosphate 5'phosphate
  modified_base 2: mod_base = OTHER; note = 2'-deoxy-2'-fluorouridine-3'-phosphate
  modified_base 3: mod_base = OTHER; note = 2'-O-methyluridine-3'-phosphate
  modified_base 4: mod_base = OTHER; note = 2'-O-methylcytidine-3'-phosphate
  modified_base 5: mod_base = OTHER; note = 2'-O-methyluridine-3'-phosphate
  modified_base 6: mod_base = OTHER; note = 2'-deoxy-2'-fluoroadenosine-3'-phosphate
  modified_base 7: mod_base = OTHER; note = 2'-O-methyluridine-3'-phosphate
  modified_base 8: mod_base = OTHER; note = 2'-O-methyladenosine-3'-phosphate
  modified_base 9: mod_base = OTHER; note = 2'-O-methylcytidine-3'-phosphate
  modified_base 10: mod_base = OTHER; note = 2'-O-methyluridine-3'-phosphate
  modified_base 11: mod_base = OTHER; note = 2'-O-methyluridine-3'-phosphate
  modified_base 12: mod_base = OTHER; note = 2'-O-methylcytidine-3'-phosphate
  modified_base 13: mod_base = OTHER; note = 2'-O-methylcytidine-3'-phosphate
  modified_base 14: mod_base = OTHER; note = 2'-deoxy-2'-fluorouridine-3'-phosphate
  modified_base 15: mod_base = OTHER; note = 2'-O-methylguanosine-3'-phosphate
  modified_base 16: mod_base = OTHER; note = 2'-deoxy-2'-fluorocytidine-3'-phosphate
  modified_base 17: mod_base = OTHER; note = 2'-O-methyluridine-3'-phosphate
  modified_base 18: mod_base = OTHER; note = 2'-O-methylcytidine-3'-phosphate
  modified_base 19: mod_base = OTHER; note = 2'-O-methylcytidine-3'-phosphate
  modified_base 20: mod_base = OTHER; note = 2'-O-methylcytidine-3'-phosphate
  modified_base 21: mod_base = OTHER; note = 2'-O-methyladenosine-3'-phosphate
  modified_base 22: mod_base = OTHER; note = 2'-O-methylguanosine-3'-phosphate
  modified_base 23: mod_base = OTHER; note = 2'-O-methylcytidine
tttctatacttcctgctcccagc

SEQ ID NO: 4586 - RNA, 23 nt, synthetic construct
  source 1..23: mol_type = other RNA
  modified_base 1: mod_base = OTHER; note = 2'-O-methyluridine-3'-phosphate 5'phosphate
  modified_base 2: mod_base = OTHER; note = 2'-deoxy-2'-fluorocytidine-3'-phosphate
  modified_base 3: mod_base = OTHER; note = 2'-O-methyluridine-3'-phosphate
  modified_base 4: mod_base = OTHER; note = 2'-O-methyluridine-3'-phosphate
  modified_base 5: mod_base = OTHER; note = 2'-O-methylcytidine-3'-phosphate
  modified_base 6: mod_base = OTHER; note = 2'-deoxy-2'-fluorouridine-3'-phosphate
  modified_base 7: mod_base = OTHER; note = 2'-O-methyladenosine-3'-phosphate
  modified_base 8: mod_base = OTHER; note = 2'-O-methyluridine-3'-phosphate
  modified_base 9: mod_base = OTHER; note = 2'-O-methyladenosine-3'-phosphate
  modified_base 10: mod_base = OTHER; note = 2'-O-methylcytidine-3'-phosphate
  modified_base 11: mod_base = OTHER; note = 2'-O-methyluridine-3'-phosphate
  modified_base 12: mod_base = OTHER; note = 2'-O-methyluridine-3'-phosphate
  modified_base 13: mod_base = OTHER; note = 2'-O-methylcytidine-3'-phosphate
  modified_base 14: mod_base = OTHER; note = 2'-deoxy-2'-fluorocytidine-3'-phosphate
  modified_base 15: mod_base = OTHER; note = 2'-O-methyluridine-3'-phosphate
  modified_base 16: mod_base = OTHER; note = 2'-deoxy-2'-fluoroguanosine-3'-phosphate
  modified_base 17: mod_base = OTHER; note = 2'-O-methylcytidine-3'-phosphate
  modified_base 18: mod_base = OTHER; note = 2'-O-methyluridine-3'-phosphate
  modified_base 19: mod_base = OTHER; note = 2'-O-methylcytidine-3'-phosphate
  modified_base 20: mod_base = OTHER; note = 2'-O-methylcytidine-3'-phosphate
  modified_base 21: mod_base = OTHER; note = 2'-O-methylcytidine-3'-phosphate
  modified_base 22: mod_base = OTHER; note = 2'-O-methyladenosine-3'-phosphate
  modified_base 23: mod_base = OTHER; note = 2'-O-methylguanosine
tcttctatacttcctgctcccag

SEQ ID NO: 4587 - RNA, 23 nt, synthetic construct
  source 1..23: mol_type = other RNA
  modified_base 1: mod_base = OTHER; note = 2'-O-methyluridine-3'-phosphate 5'phosphate
  modified_base 2: mod_base = OTHER; note = 2'-deoxy-2'-fluorouridine-3'-phosphate
  modified_base 3: mod_base = OTHER; note = 2'-O-methylcytidine-3'-phosphate
  modified_base 4: mod_base = OTHER; note = 2'-O-methyluridine-3'-phosphate
  modified_base 5: mod_base = OTHER; note = 2'-O-methyluridine-3'-phosphate
  modified_base 6: mod_base = OTHER; note = 2'-deoxy-2'-fluorocytidine-3'-phosphate
  modified_base 7: mod_base = OTHER; note = 2'-O-methyluridine-3'-phosphate
  modified_base 8: mod_base = OTHER; note = 2'-O-methyladenosine-3'-phosphate
  modified_base 9: mod_base = OTHER; note = 2'-O-methyluridine-3'-phosphate
  modified_base 10: mod_base = OTHER; note = 2'-O-methyladenosine-3'-phosphate
  modified_base 11: mod_base = OTHER; note = 2'-O-methylcytidine-3'-phosphate
  modified_base 12: mod_base = OTHER; note = 2'-O-methyluridine-3'-phosphate
  modified_base 13: mod_base = OTHER; note = 2'-O-methyluridine-3'-phosphate
  modified_base 14: mod_base = OTHER; note = 2'-deoxy-2'-fluorocytidine-3'-phosphate
  modified_base 15: mod_base = OTHER; note = 2'-O-methylcytidine-3'-phosphate
  modified_base 16: mod_base = OTHER; note = 2'-deoxy-2'-fluorouridine-3'-phosphate
  modified_base 17: mod_base = OTHER; note = 2'-O-methylguanosine-3'-phosphate
  modified_base 18: mod_base = OTHER; note = 2'-O-methylcytidine-3'-phosphate
  modified_base 19: mod_base = OTHER; note = 2'-O-methyluridine-3'-phosphate
  modified_base 20: mod_base = OTHER; note = 2'-O-methylcytidine-3'-phosphate
  modified_base 21: mod_base = OTHER; note = 2'-O-methylcytidine-3'-phosphate
  modified_base 22: mod_base = OTHER; note = 2'-O-methylcytidine-3'-phosphate
  modified_base 23: mod_base = OTHER; note = 2'-O-methyladenosine
ttcttctatacttcctgctccca

SEQ ID NO: 4588 - RNA, 23 nt, synthetic construct
  source 1..23: mol_type = other RNA
  modified_base 1: mod_base = OTHER; note = 2'-O-methyluridine-3'-phosphate 5'phosphate
  modified_base 2: mod_base = OTHER; note = 2'-deoxy-2'-fluorouridine-3'-phosphate
  modified_base 3: mod_base = OTHER; note = 2'-O-methyluridine-3'-phosphate
  modified_base 4: mod_base = OTHER; note = 2'-O-methylcytidine-3'-phosphate
  modified_base 5: mod_base = OTHER; note = 2'-O-methyluridine-3'-phosphate
  modified_base 6: mod_base = OTHER; note = 2'-deoxy-2'-fluorouridine-3'-phosphate
  modified_base 7: mod_base = OTHER; note = 2'-O-methylcytidine-3'-phosphate
  modified_base 8: mod_base = OTHER; note = 2'-O-methyluridine-3'-phosphate
  modified_base 9: mod_base = OTHER; note = 2'-O-methyladenosine-3'-phosphate
  modified_base 10: mod_base = OTHER; note = 2'-O-methyluridine-3'-phosphate
  modified_base 11: mod_base = OTHER; note = 2'-O-methyladenosine-3'-phosphate
  modified_base 12: mod_base = OTHER; note = 2'-O-methylcytidine-3'-phosphate
  modified_base 13: mod_base = OTHER; note = 2'-O-methyluridine-3'-phosphate
  modified_base 14: mod_base = OTHER; note = 2'-deoxy-2'-fluorouridine-3'-phosphate
  modified_base 15: mod_base = OTHER; note = 2'-O-methylcytidine-3'-phosphate
  modified_base 16: mod_base = OTHER; note = 2'-deoxy-2'-fluorocytidine-3'-phosphate
  modified_base 17: mod_base = OTHER; note = 2'-O-methyluridine-3'-phosphate
  modified_base 18: mod_base = OTHER; note = 2'-O-methylguanosine-3'-phosphate
  modified_base 19: mod_base = OTHER; note = 2'-O-methylcytidine-3'-phosphate
  modified_base 20: mod_base = OTHER; note = 2'-O-methyluridine-3'-phosphate
  modified_base 21: mod_base = OTHER; note = 2'-O-methylcytidine-3'-phosphate
  modified_base 22: mod_base = OTHER; note = 2'-O-methylcytidine-3'-phosphate
  modified_base 23: mod_base = OTHER; note = 2'-O-methylcytidine
tttcttctatacttcctgctccc

SEQ ID NO: 4589 - RNA, 23 nt, synthetic construct
  source 1..23: mol_type = other RNA
  modified_base 1: mod_base = OTHER; note = 2'-O-methyluridine-3'-phosphate 5'phosphate
  modified_base 2: mod_base = OTHER; note = 2'-deoxy-2'-fluoroadenosine-3'-phosphate
  modified_base 3: mod_base = OTHER; note = 2'-O-methyluridine-3'-phosphate
  modified_base 4: mod_base = OTHER; note = 2'-O-methyluridine-3'-phosphate
  modified_base 5: mod_base = OTHER; note = 2'-O-methylcytidine-3'-phosphate
  modified_base 6: mod_base = OTHER; note = 2'-deoxy-2'-fluorouridine-3'-phosphate
  modified_base 7: mod_base = OTHER; note = 2'-O-methyluridine-3'-phosphate
  modified_base 8: mod_base = OTHER; note = 2'-O-methylcytidine-3'-phosphate
  modified_base 9: mod_base = OTHER; note = 2'-O-methyluridine-3'-phosphate
  modified_base 10: mod_base = OTHER; note = 2'-O-methyladenosine-3'-phosphate
  modified_base 11: mod_base = OTHER; note = 2'-O-methyluridine-3'-phosphate
  modified_base 12: mod_base = OTHER; note = 2'-O-methyladenosine-3'-phosphate
  modified_base 13: mod_base = OTHER; note = 2'-O-methylcytidine-3'-phosphate
  modified_base 14: mod_base = OTHER; note = 2'-deoxy-2'-fluorouridine-3'-phosphate
  modified_base 15: mod_base = OTHER; note = 2'-O-methyluridine-3'-phosphate
  modified_base 16: mod_base = OTHER; note = 2'-deoxy-2'-fluorocytidine-3'-phosphate
  modified_base 17: mod_base = OTHER; note = 2'-O-methylcytidine-3'-phosphate
  modified_base 18: mod_base = OTHER; note = 2'-O-methyluridine-3'-phosphate
  modified_base 19: mod_base = OTHER; note = 2'-O-methylguanosine-3'-phosphate
  modified_base 20: mod_base = OTHER; note = 2'-O-methylcytidine-3'-phosphate
  modified_base 21: mod_base = OTHER; note = 2'-O-methyluridine-3'-phosphate
  modified_base 22: mod_base = OTHER; note = 2'-O-methylcytidine-3'-phosphate
  modified_base 23: mod_base = OTHER; note = 2'-O-methylcytidine
tattcttctatacttcctgctcc

SEQ ID NO: 4590 - RNA, 23 nt, synthetic construct
  source 1..23: mol_type = other RNA
  modified_base 1: mod_base = OTHER; note = 2'-O-methyluridine-3'-phosphate 5'phosphate
  modified_base 2: mod_base = OTHER; note = 2'-deoxy-2'-fluorocytidine-3'-phosphate
  modified_base 3: mod_base = OTHER; note = 2'-O-methyladenosine-3'-phosphate
  modified_base 4: mod_base = OTHER; note = 2'-O-methyluridine-3'-phosphate
  modified_base 5: mod_base = OTHER; note = 2'-O-methyluridine-3'-phosphate
  modified_base 6: mod_base = OTHER; note = 2'-deoxy-2'-fluorocytidine-3'-phosphate
  modified_base 7: mod_base = OTHER; note = 2'-O-methyluridine-3'-phosphate
  modified_base 8: mod_base = OTHER; note = 2'-O-methyluridine-3'-phosphate
  modified_base 9: mod_base = OTHER; note = 2'-O-methylcytidine-3'-phosphate
  modified_base 10: mod_base = OTHER; note = 2'-O-methyluridine-3'-phosphate
  modified_base 11: mod_base = OTHER; note = 2'-O-methyladenosine-3'-phosphate
  modified_base 12: mod_base = OTHER; note = 2'-O-methyluridine-3'-phosphate
  modified_base 13: mod_base = OTHER; note = 2'-O-methyladenosine-3'-phosphate
  modified_base 14: mod_base = OTHER; note = 2'-deoxy-2'-fluorocytidine-3'-phosphate
  modified_base 15: mod_base = OTHER; note = 2'-O-methyluridine-3'-phosphate
  modified_base 16: mod_base = OTHER; note = 2'-deoxy-2'-fluorouridine-3'-phosphate
  modified_base 17: mod_base = OTHER; note = 2'-O-methylcytidine-3'-phosphate
  modified_base 18: mod_base = OTHER; note = 2'-O-methylcytidine-3'-phosphate
  modified_base 19: mod_base = OTHER; note = 2'-O-methyluridine-3'-phosphate
  modified_base 20: mod_base = OTHER; note = 2'-O-methylguanosine-3'-phosphate
  modified_base 21: mod_base = OTHER; note = 2'-O-methylcytidine-3'-phosphate
  modified_base 22: mod_base = OTHER; note = 2'-O-methyluridine-3'-phosphate
  modified_base 23: mod_base = OTHER; note = 2'-O-methylcytidine
tcattcttctatacttcctgctc

SEQ ID NO: 4591 - RNA, 23 nt, synthetic construct
  source 1..23: mol_type = other RNA
  modified_base 1: mod_base = OTHER; note = 2'-O-methyluridine-3'-phosphate 5'phosphate
  modified_base 2: mod_base = OTHER; note = 2'-deoxy-2'-fluoroadenosine-3'-phosphate
  modified_base 3: mod_base = OTHER; note = 2'-O-methylcytidine-3'-phosphate
  modified_base 4: mod_base = OTHER; note = 2'-O-methyladenosine-3'-phosphate
  modified_base 5: mod_base = OTHER; note = 2'-O-methyluridine-3'-phosphate
  modified_base 6: mod_base = OTHER; note = 2'-deoxy-2'-fluorouridine-3'-phosphate
  modified_base 7: mod_base = OTHER; note = 2'-O-methylcytidine-3'-phosphate
  modified_base 8: mod_base = OTHER; note = 2'-O-methyluridine-3'-phosphate
  modified_base 9: mod_base = OTHER; note = 2'-O-methyluridine-3'-phosphate
  modified_base 10: mod_base = OTHER; note = 2'-O-methylcytidine-3'-phosphate
  modified_base 11: mod_base = OTHER; note = 2'-O-methyluridine-3'-phosphate
  modified_base 12: mod_base = OTHER; note = 2'-O-methyladenosine-3'-phosphate
  modified_base 13: mod_base = OTHER; note = 2'-O-methyluridine-3'-phosphate
  modified_base 14: mod_base = OTHER; note = 2'-deoxy-2'-fluoroadenosine-3'-phosphate
  modified_base 15: mod_base = OTHER; note = 2'-O-methylcytidine-3'-phosphate
  modified_base 16: mod_base = OTHER; note = 2'-deoxy-2'-fluorouridine-3'-phosphate
  modified_base 17: mod_base = OTHER; note = 2'-O-methyluridine-3'-phosphate
  modified_base 18: mod_base = OTHER; note = 2'-O-methylcytidine-3'-phosphate
  modified_base 19: mod_base = OTHER; note = 2'-O-methylcytidine-3'-phosphate
  modified_base 20: mod_base = OTHER; note = 2'-O-methyluridine-3'-phosphate
  modified_base 21: mod_base = OTHER; note = 2'-O-methylguanosine-3'-phosphate
  modified_base 22: mod_base = OTHER; note = 2'-O-methylcytidine-3'-phosphate
  modified_base 23: mod_base = OTHER; note = 2'-O-methyluridine
tacattcttctatacttcctgct

SEQ ID NO: 4592 - RNA, 23 nt, synthetic construct
  source 1..23: mol_type = other RNA
  modified_base 1: mod_base = OTHER; note = 2'-O-methyluridine-3'-phosphate 5'phosphate
  modified_base 2: mod_base = OTHER; note = 2'-deoxy-2'-fluorocytidine-3'-phosphate
  modified_base 3: mod_base = OTHER; note = 2'-O-methyladenosine-3'-phosphate
  modified_base 4: mod_base = OTHER; note = 2'-O-methylcytidine-3'-phosphate
  modified_base 5: mod_base = OTHER; note = 2'-O-methyladenosine-3'-phosphate
  modified_base 6: mod_base = OTHER; note = 2'-deoxy-2'-fluorouridine-3'-phosphate
  modified_base 7: mod_base = OTHER; note = 2'-O-methyluridine-3'-phosphate
  modified_base 8: mod_base = OTHER; note = 2'-O-methylcytidine-3'-phosphate
  modified_base 9: mod_base = OTHER; note = 2'-O-methyluridine-3'-phosphate
  modified_base 10: mod_base = OTHER; note = 2'-O-methyluridine-3'-phosphate
  modified_base 11: mod_base = OTHER; note = 2'-O-methylcytidine-3'-phosphate
  modified_base 12: mod_base = OTHER; note = 2'-O-methyluridine-3'-phosphate
  modified_base 13: mod_base = OTHER; note = 2'-O-methyladenosine-3'-phosphate
  modified_base 14: mod_base = OTHER; note = 2'-deoxy-2'-fluorouridine-3'-phosphate
  modified_base 15: mod_base = OTHER; note = 2'-O-methyladenosine-3'-phosphate
  modified_base 16: mod_base = OTHER; note = 2'-deoxy-2'-fluorocytidine-3'-phosphate
  modified_base 17: mod_base = OTHER; note = 2'-O-methyluridine-3'-phosphate
  modified_base 18: mod_base = OTHER; note = 2'-O-methyluridine-3'-phosphate
  modified_base 19: mod_base = OTHER; note = 2'-O-methylcytidine-3'-phosphate
  modified_base 20: mod_base = OTHER; note = 2'-O-methylcytidine-3'-phosphate
  modified_base 21: mod_base = OTHER; note = 2'-O-methyluridine-3'-phosphate
  modified_base 22: mod_base = OTHER; note = 2'-O-methylguanosine-3'-phosphate
  modified_base 23: mod_base = OTHER; note = 2'-O-methylcytidine
tcacattcttctatacttcctgc

SEQ ID NO: 4593 - RNA, 23 nt, synthetic construct
  source 1..23: mol_type = other RNA
  modified_base 1: mod_base = OTHER; note = 2'-O-methyluridine-3'-phosphate 5'phosphate
  modified_base 2: mod_base = OTHER; note = 2'-deoxy-2'-fluoroguanosine-3'-phosphate
  modified_base 3: mod_base = OTHER; note = 2'-O-methylcytidine-3'-phosphate
  modified_base 4: mod_base = OTHER; note = 2'-O-methyladenosine-3'-phosphate
  modified_base 5: mod_base = OTHER; note = 2'-O-methylcytidine-3'-phosphate
  modified_base 6: mod_base = OTHER; note = 2'-deoxy-2'-fluoroadenosine-3'-phosphate
  modified_base 7: mod_base = OTHER; note = 2'-O-methyluridine-3'-phosphate
  modified_base 8: mod_base = OTHER; note = 2'-O-methyluridine-3'-phosphate
  modified_base 9: mod_base = OTHER; note = 2'-O-methylcytidine-3'-phosphate
  modified_base 10: mod_base = OTHER; note = 2'-O-methyluridine-3'-phosphate
  modified_base 11: mod_base = OTHER; note = 2'-O-methyluridine-3'-phosphate
  modified_base 12: mod_base = OTHER; note = 2'-O-methylcytidine-3'-phosphate
  modified_base 13: mod_base = OTHER; note = 2'-O-methyluridine-3'-phosphate
  modified_base 14: mod_base = OTHER; note = 2'-deoxy-2'-fluoroadenosine-3'-phosphate
  modified_base 15: mod_base = OTHER; note = 2'-O-methyluridine-3'-phosphate
  modified_base 16: mod_base = OTHER; note = 2'-deoxy-2'-fluoroadenosine-3'-phosphate
  modified_base 17: mod_base = OTHER; note = 2'-O-methylcytidine-3'-phosphate
  modified_base 18: mod_base = OTHER; note = 2'-O-methyluridine-3'-phosphate
  modified_base 19: mod_base = OTHER; note = 2'-O-methyluridine-3'-phosphate
  modified_base 20: mod_base = OTHER; note = 2'-O-methylcytidine-3'-phosphate
  modified_base 21: mod_base = OTHER; note = 2'-O-methylcytidine-3'-phosphate
  modified_base 22: mod_base = OTHER; note = 2'-O-methyluridine-3'-phosphate
  modified_base 23: mod_base = OTHER; note = 2'-O-methylguanosine
tgcacattcttctatacttcctg

SEQ ID NO: 4594 - RNA, 23 nt, synthetic construct
  source 1..23: mol_type = other RNA
  modified_base 1: mod_base = OTHER; note = 2'-O-methyluridine-3'-phosphate 5'phosphate
  modified_base 2: mod_base = OTHER; note = 2'-deoxy-2'-fluorouridine-3'-phosphate
  modified_base 3: mod_base = OTHER; note = 2'-O-methylguanosine-3'-phosphate
  modified_base 4: mod_base = OTHER; note = 2'-O-methylcytidine-3'-phosphate
  modified_base 5: mod_base = OTHER; note = 2'-O-methyladenosine-3'-phosphate
  modified_base 6: mod_base = OTHER; note = 2'-deoxy-2'-fluorocytidine-3'-phosphate
  modified_base 7: mod_base = OTHER; note = 2'-O-methyladenosine-3'-phosphate
  modified_base 8: mod_base = OTHER; note = 2'-O-methyluridine-3'-phosphate
  modified_base 9: mod_base = OTHER; note = 2'-O-methyluridine-3'-phosphate
  modified_base 10: mod_base = OTHER; note = 2'-O-methylcytidine-3'-phosphate
  modified_base 11: mod_base = OTHER; note = 2'-O-methyluridine-3'-phosphate
  modified_base 12: mod_base = OTHER; note = 2'-O-methyluridine-3'-phosphate
  modified_base 13: mod_base = OTHER; note = 2'-O-methylcytidine-3'-phosphate
  modified_base 14: mod_base = OTHER; note = 2'-deoxy-2'-fluorouridine-3'-phosphate
  modified_base 15: mod_base = OTHER; note = 2'-O-methyladenosine-3'-phosphate
  modified_base 16: mod_base = OTHER; note = 2'-deoxy-2'-fluorouridine-3'-phosphate
  modified_base 17: mod_base = OTHER; note = 2'-O-methyladenosine-3'-phosphate
  modified_base 18: mod_base = OTHER; note = 2'-O-methylcytidine-3'-phosphate
  modified_base 19: mod_base = OTHER; note = 2'-O-methyluridine-3'-phosphate
  modified_base 20: mod_base = OTHER; note = 2'-O-methyluridine-3'-phosphate
  modified_base 21: mod_base = OTHER; note = 2'-O-methylcytidine-3'-phosphate
  modified_base 22: mod_base = OTHER; note = 2'-O-methylcytidine-3'-phosphate
  modified_base 23: mod_base = OTHER; note = 2'-O-methyluridine
ttgcacattcttctatacttcct

SEQ ID NO: 4595 - RNA, 23 nt, synthetic construct
  source 1..23: mol_type = other RNA
  modified_base 1: mod_base = OTHER; note = 2'-O-methyluridine-3'-phosphate 5'phosphate
  modified_base 2: mod_base = OTHER; note = 2'-deoxy-2'-fluorocytidine-3'-phosphate
  modified_base 3: mod_base = OTHER; note = 2'-O-methyluridine-3'-phosphate
  modified_base 4: mod_base = OTHER; note = 2'-O-methylguanosine-3'-phosphate
  modified_base 5: mod_base = OTHER; note = 2'-O-methylcytidine-3'-phosphate
  modified_base 6: mod_base = OTHER; note = 2'-deoxy-2'-fluoroadenosine-3'-phosphate
  modified_base 7: mod_base = OTHER; note = 2'-O-methylcytidine-3'-phosphate
  modified_base 8: mod_base = OTHER; note = 2'-O-methyladenosine-3'-phosphate
  modified_base 9: mod_base = OTHER; note = 2'-O-methyluridine-3'-phosphate
  modified_base 10: mod_base = OTHER; note = 2'-O-methyluridine-3'-phosphate
  modified_base 11: mod_base = OTHER; note = 2'-O-methylcytidine-3'-phosphate
  modified_base 12: mod_base = OTHER; note = 2'-O-methyluridine-3'-phosphate
  modified_base 13: mod_base = OTHER; note = 2'-O-methyluridine-3'-phosphate
  modified_base 14: mod_base = OTHER; note = 2'-deoxy-2'-fluorocytidine-3'-phosphate
  modified_base 15: mod_base = OTHER; note = 2'-O-methyluridine-3'-phosphate
  modified_base 16: mod_base = OTHER; note = 2'-deoxy-2'-fluoroadenosine-3'-phosphate
  modified_base 17: mod_base = OTHER; note = 2'-O-methyluridine-3'-phosphate
  modified_base 18: mod_base = OTHER; note = 2'-O-methyladenosine-3'-phosphate
  modified_base 19: mod_base = OTHER; note = 2'-O-methylcytidine-3'-phosphate
  modified_base 20: mod_base = OTHER; note = 2'-O-methyluridine-3'-phosphate
  modified_base 21: mod_base = OTHER; note = 2'-O-methyluridine-3'-phosphate
  modified_base 22: mod_base = OTHER; note = 2'-O-methylcytidine-3'-phosphate
  modified_base 23: mod_base = OTHER; note = 2'-O-methylcytidine
tctgcacattcttctatacttcc

SEQ ID NO: 4596 - RNA, 23 nt, synthetic construct
  source 1..23: mol_type = other RNA
  modified_base 1: mod_base = OTHER; note = 2'-O-methyluridine-3'-phosphate 5'phosphate
  modified_base 2: mod_base = OTHER; note = 2'-deoxy-2'-fluoroguanosine-3'-phosphate
  modified_base 3: mod_base = OTHER; note = 2'-O-methylcytidine-3'-phosphate
  modified_base 4: mod_base = OTHER; note = 2'-O-methyluridine-3'-phosphate
  modified_base 5: mod_base = OTHER; note = 2'-O-methylguanosine-3'-phosphate
  modified_base 6: mod_base = OTHER; note = 2'-deoxy-2'-fluorocytidine-3'-phosphate
  modified_base 7: mod_base = OTHER; note = 2'-O-methyladenosine-3'-phosphate
  modified_base 8: mod_base = OTHER; note = 2'-O-methylcytidine-3'-phosphate
  modified_base 9: mod_base = OTHER; note = 2'-O-methyladenosine-3'-phosphate
  modified_base 10: mod_base = OTHER; note = 2'-O-methyluridine-3'-phosphate
  modified_base 11: mod_base = OTHER; note = 2'-O-methyluridine-3'-phosphate
  modified_base 12: mod_base = OTHER; note = 2'-O-methylcytidine-3'-phosphate
  modified_base 13: mod_base = OTHER; note = 2'-O-methyluridine-3'-phosphate
  modified_base 14: mod_base = OTHER; note = 2'-deoxy-2'-fluorouridine-3'-phosphate
  modified_base 15: mod_base = OTHER; note = 2'-O-methylcytidine-3'-phosphate
  modified_base 16: mod_base = OTHER; note = 2'-deoxy-2'-fluorouridine-3'-phosphate
  modified_base 17: mod_base = OTHER; note = 2'-O-methyladenosine-3'-phosphate
  modified_base 18: mod_base = OTHER; note = 2'-O-methyluridine-3'-phosphate
  modified_base 19: mod_base = OTHER; note = 2'-O-methyladenosine-3'-phosphate
  modified_base 20: mod_base = OTHER; note = 2'-O-methylcytidine-3'-phosphate
  modified_base 21: mod_base = OTHER; note = 2'-O-methyluridine-3'-phosphate
  modified_base 22: mod_base = OTHER; note = 2'-O-methyluridine-3'-phosphate
  modified_base 23: mod_base = OTHER; note = 2'-O-methylcytidine
tgctgcacattcttctatacttc

SEQ ID NO: 4597 - RNA, 23 nt, synthetic construct
  source 1..23: mol_type = other RNA
  modified_base 1: mod_base = OTHER; note = 2'-O-methyluridine-3'-phosphate 5'phosphate
  modified_base 2: mod_base = OTHER; note = 2'-deoxy-2'-fluorouridine-3'-phosphate
  modified_base 3: mod_base = OTHER; note = 2'-O-methylguanosine-3'-phosphate
  modified_base 4: mod_base = OTHER; note = 2'-O-methylcytidine-3'-phosphate
  modified_base 5: mod_base = OTHER; note = 2'-O-methyluridine-3'-phosphate
  modified_base 6: mod_base = OTHER; note = 2'-deoxy-2'-fluoroguanosine-3'-phosphate
  modified_base 7: mod_base = OTHER; note = 2'-O-methylcytidine-3'-phosphate
  modified_base 8: mod_base = OTHER; note = 2'-O-methyladenosine-3'-phosphate
  modified_base 9: mod_base = OTHER; note = 2'-O-methylcytidine-3'-phosphate
  modified_base 10: mod_base = OTHER; note = 2'-O-methyladenosine-3'-phosphate
  modified_base 11: mod_base = OTHER; note = 2'-O-methyluridine-3'-phosphate
  modified_base 12: mod_base = OTHER; note = 2'-O-methyluridine-3'-phosphate
  modified_base 13: mod_base = OTHER; note = 2'-O-methylcytidine-3'-phosphate
  modified_base 14: mod_base = OTHER; note = 2'-deoxy-2'-fluorouridine-3'-phosphate
  modified_base 15: mod_base = OTHER; note = 2'-O-methyluridine-3'-phosphate
  modified_base 16: mod_base = OTHER; note = 2'-deoxy-2'-fluorocytidine-3'-phosphate
  modified_base 17: mod_base = OTHER; note = 2'-O-methyluridine-3'-phosphate
  modified_base 18: mod_base = OTHER; note = 2'-O-methyladenosine-3'-phosphate
  modified_base 19: mod_base = OTHER; note = 2'-O-methyluridine-3'-phosphate
  modified_base 20: mod_base = OTHER; note = 2'-O-methyladenosine-3'-phosphate
  modified_base 21: mod_base = OTHER; note = 2'-O-methylcytidine-3'-phosphate
  modified_base 22: mod_base = OTHER; note = 2'-O-methyluridine-3'-phosphate
  modified_base 23: mod_base = OTHER; note = 2'-O-methyluridine
ttgctgcacattcttctatactt

SEQ ID NO: 4598 - RNA, 23 nt, synthetic construct
  source 1..23: mol_type = other RNA
  modified_base 1: mod_base = OTHER; note = 2'-O-methyluridine-3'-phosphate 5'phosphate
  modified_base 2: mod_base = OTHER; note = 2'-deoxy-2'-fluorouridine-3'-phosphate
  modified_base 3: mod_base = OTHER; note = 2'-O-methyluridine-3'-phosphate
  modified_base 4: mod_base = OTHER; note = 2'-O-methylguanosine-3'-phosphate
  modified_base 5: mod_base = OTHER; note = 2'-O-methylcytidine-3'-phosphate
  modified_base 6: mod_base = OTHER; note = 2'-deoxy-2'-fluorouridine-3'-phosphate
  modified_base 7: mod_base = OTHER; note = 2'-O-methylguanosine-3'-phosphate
  modified_base 8: mod_base = OTHER; note = 2'-O-methylcytidine-3'-phosphate
  modified_base 9: mod_base = OTHER; note = 2'-O-methyladenosine-3'-phosphate
  modified_base 10: mod_base = OTHER; note = 2'-O-methylcytidine-3'-phosphate
  modified_base 11: mod_base = OTHER; note = 2'-O-methyladenosine-3'-phosphate
  modified_base 12: mod_base = OTHER; note = 2'-O-methyluridine-3'-phosphate
  modified_base 13: mod_base = OTHER; note = 2'-O-methyluridine-3'-phosphate
  modified_base 14: mod_base = OTHER; note = 2'-deoxy-2'-fluorocytidine-3'-phosphate
  modified_base 15: mod_base = OTHER; note = 2'-O-methyluridine-3'-phosphate
  modified_base 16: mod_base = OTHER; note = 2'-deoxy-2'-fluorouridine-3'-phosphate
  modified_base 17: mod_base = OTHER; note = 2'-O-methylcytidine-3'-phosphate
  modified_base 18: mod_base = OTHER; note = 2'-O-methyluridine-3'-phosphate
  modified_base 19: mod_base = OTHER; note = 2'-O-methyladenosine-3'-phosphate
  modified_base 20: mod_base = OTHER; note = 2'-O-methyluridine-3'-phosphate
  modified_base 21: mod_base = OTHER; note = 2'-O-methyladenosine-3'-phosphate
  modified_base 22: mod_base = OTHER; note = 2'-O-methylcytidine-3'-phosphate
  modified_base 23: mod_base = OTHER; note = 2'-O-methyluridine
tttgctgcacattcttctatact

SEQ ID NO: 4599 - RNA, 23 nt, synthetic construct
  source 1..23: mol_type = other RNA
  modified_base 1: mod_base = OTHER; note = 2'-O-methyluridine-3'-phosphate 5'phosphate
  modified_base 2: mod_base = OTHER; note = 2'-deoxy-2'-fluorocytidine-3'-phosphate
  modified_base 3: mod_base = OTHER; note = 2'-O-methyluridine-3'-phosphate
  modified_base 4: mod_base = OTHER; note = 2'-O-methylcytidine-3'-phosphate
  modified_base 5: mod_base = OTHER; note = 2'-O-methyluridine-3'-phosphate
  modified_base 6: mod_base = OTHER; note = 2'-deoxy-2'-fluorouridine-3'-phosphate
  modified_base 7: mod_base = OTHER; note = 2'-O-methyluridine-3'-phosphate
  modified_base 8: mod_base = OTHER; note = 2'-O-methyladenosine-3'-phosphate
  modified_base 9: mod_base = OTHER; note = 2'-O-methylcytidine-3'-phosphate
  modified_base 10: mod_base = OTHER; note = 2'-O-methyluridine-3'-phosphate
  modified_base 11: mod_base = OTHER; note = 2'-O-methylguanosine-3'-phosphate
  modified_base 12: mod_base = OTHER; note = 2'-O-methyluridine-3'-phosphate
  modified_base 13: mod_base = OTHER; note = 2'-O-methylguanosine-3'-phosphate
  modified_base 14: mod_base = OTHER; note = 2'-deoxy-2'-fluoroadenosine-3'-phosphate
  modified_base 15: mod_base = OTHER; note = 2'-O-methyluridine-3'-phosphate
  modified_base 16: mod_base = OTHER; note = 2'-deoxy-2'-fluoroadenosine-3'-phosphate
  modified_base 17: mod_base = OTHER; note = 2'-O-methyluridine-3'-phosphate
  modified_base 18: mod_base = OTHER; note = 2'-O-methyluridine-3'-phosphate
  modified_base 19: mod_base = OTHER; note = 2'-O-methylguanosine-3'-phosphate
  modified_base 20: mod_base = OTHER; note = 2'-O-methylguanosine-3'-phosphate
  modified_base 21: mod_base = OTHER; note = 2'-O-methyladenosine-3'-phosphate
  modified_base 22: mod_base = OTHER; note = 2'-O-methyladenosine-3'-phosphate
  modified_base 23: mod_base = OTHER; note = 2'-O-methyluridine
tctctttactgtgatattggaat

SEQ ID NO: 4600 - RNA, 23 nt, synthetic construct
  source 1..23: mol_type = other RNA
  modified_base 1: mod_base = OTHER; note = 2'-O-methyluridine-3'-phosphate 5'phosphate
  modified_base 2: mod_base = OTHER; note = 2'-deoxy-2'-fluoroguanosine-3'-phosphate
  modified_base 3: mod_base = OTHER; note = 2'-O-methylcytidine-3'-phosphate
  modified_base 4: mod_base = OTHER; note = 2'-O-methyluridine-3'-phosphate
  modified_base 5: mod_base = OTHER; note = 2'-O-methylcytidine-3'-phosphate
  modified_base 6: mod_base = OTHER; note = 2'-deoxy-2'-fluorouridine-3'-phosphate
  modified_base 7: mod_base = OTHER; note = 2'-O-methyluridine-3'-phosphate
  modified_base 8: mod_base = OTHER; note = 2'-O-methyluridine-3'-phosphate
  modified_base 9: mod_base = OTHER; note = 2'-O-methyladenosine-3'-phosphate
  modified_base 10: mod_base = OTHER; note = 2'-O-methylcytidine-3'-phosphate
  modified_base 11: mod_base = OTHER; note = 2'-O-methyluridine-3'-phosphate
  modified_base 12: mod_base = OTHER; note = 2'-O-methylguanosine-3'-phosphate
  modified_base 13: mod_base = OTHER; note = 2'-O-methyluridine-3'-phosphate
  modified_base 14: mod_base = OTHER; note = 2'-deoxy-2'-fluoroguanosine-3'-phosphate
  modified_base 15: mod_base = OTHER; note = 2'-O-methyladenosine-3'-phosphate
  modified_base 16: mod_base = OTHER; note = 2'-deoxy-2'-fluorouridine-3'-phosphate
  modified_base 17: mod_base = OTHER; note = 2'-O-methyladenosine-3'-phosphate
  modified_base 18: mod_base = OTHER; note = 2'-O-methyluridine-3'-phosphate
  modified_base 19: mod_base = OTHER; note = 2'-O-methyluridine-3'-phosphate
  modified_base 20: mod_base = OTHER; note = 2'-O-methylguanosine-3'-phosphate
  modified_base 21: mod_base = OTHER; note = 2'-O-methylguanosine-3'-phosphate
  modified_base 22: mod_base = OTHER; note = 2'-O-methyladenosine-3'-phosphate
  modified_base 23: mod_base = OTHER; note = 2'-O-methyladenosine
tgctctttactgtgatattggaa

SEQ ID NO: 4601 - RNA, 23 nt, synthetic construct
  source 1..23: mol_type = other RNA
  modified_base 1: mod_base = OTHER; note = 2'-O-methyluridine-3'-phosphate 5'phosphate
  modified_base 2: mod_base = OTHER; note = 2'-deoxy-2'-fluorouridine-3'-phosphate
  modified_base 3: mod_base = OTHER; note = 2'-O-methylguanosine-3'-phosphate
  modified_base 4: mod_base = OTHER; note = 2'-O-methylcytidine-3'-phosphate
  modified_base 5: mod_base = OTHER; note = 2'-O-methyluridine-3'-phosphate
  modified_base 6: mod_base = OTHER; note = 2'-deoxy-2'-fluorocytidine-3'-phosphate
  modified_base 7: mod_base = OTHER; note = 2'-O-methyluridine-3'-phosphate
  modified_base 8: mod_base = OTHER; note = 2'-O-methyluridine-3'-phosphate
  modified_base 9: mod_base = OTHER; note = 2'-O-methyluridine-3'-phosphate
  modified_base 10: mod_base = OTHER; note = 2'-O-methyladenosine-3'-phosphate
  modified_base 11: mod_base = OTHER; note = 2'-O-methylcytidine-3'-phosphate
  modified_base 12: mod_base = OTHER; note = 2'-O-methyluridine-3'-phosphate
  modified_base 13: mod_base = OTHER; note = 2'-O-methylguanosine-3'-phosphate
  modified_base 14: mod_base = OTHER; note = 2'-deoxy-2'-fluorouridine-3'-phosphate
  modified_base 15: mod_base = OTHER; note = 2'-O-methylguanosine-3'-phosphate
  modified_base 16: mod_base = OTHER; note = 2'-deoxy-2'-fluoroadenosine-3'-phosphate
  modified_base 17: mod_base = OTHER; note = 2'-O-methyluridine-3'-phosphate
  modified_base 18: mod_base = OTHER; note = 2'-O-methyladenosine-3'-phosphate
  modified_base 19: mod_base = OTHER; note = 2'-O-methyluridine-3'-phosphate
  modified_base 20: mod_base = OTHER; note = 2'-O-methyluridine-3'-phosphate
  modified_base 21: mod_base = OTHER; note = 2'-O-methylguanosine-3'-phosphate
  modified_base 22: mod_base = OTHER; note = 2'-O-methylguanosine-3'-phosphate
  modified_base 23: mod_base = OTHER; note = 2'-O-methyladenosine
ttgctctttactgtgatattgga

SEQ ID NO: 4602 - RNA, 23 nt, synthetic construct
  source 1..23: mol_type = other RNA
  modified_base 1: mod_base = OTHER; note = 2'-O-methyluridine-3'-phosphate 5'phosphate
  modified_base 2: mod_base = OTHER; note = 2'-deoxy-2'-fluorouridine-3'-phosphate
  modified_base 3: mod_base = OTHER; note = 2'-O-methyluridine-3'-phosphate
  modified_base 4: mod_base = OTHER; note = 2'-O-methylguanosine-3'-phosphate
  modified_base 5: mod_base = OTHER; note = 2'-O-methylcytidine-3'-phosphate
  modified_base 6: mod_base = OTHER; note = 2'-deoxy-2'-fluorouridine-3'-phosphate
  modified_base 7: mod_base = OTHER; note = 2'-O-methylcytidine-3'-phosphate
  modified_base 8: mod_base = OTHER; note = 2'-O-methyluridine-3'-phosphate
  modified_base 9: mod_base = OTHER; note = 2'-O-methyluridine-3'-phosphate
  modified_base 10: mod_base = OTHER; note = 2'-O-methyluridine-3'-phosphate
  modified_base 11: mod_base = OTHER; note = 2'-O-methyladenosine-3'-phosphate
  modified_base 12: mod_base = OTHER; note = 2'-O-methylcytidine-3'-phosphate
  modified_base 13: mod_base = OTHER; note = 2'-O-methyluridine-3'-phosphate
  modified_base 14: mod_base = OTHER; note = 2'-deoxy-2'-fluoroguanosine-3'-phosphate
  modified_base 15: mod_base = OTHER; note = 2'-O-methyluridine-3'-phosphate
  modified_base 16: mod_base = OTHER; note = 2'-deoxy-2'-fluoroguanosine-3'-phosphate
  modified_base 17: mod_base = OTHER; note = 2'-O-methyladenosine-3'-phosphate
  modified_base 18: mod_base = OTHER; note = 2'-O-methyluridine-3'-phosphate
  modified_base 19: mod_base = OTHER; note = 2'-O-methyladenosine-3'-phosphate
  modified_base 20: mod_base = OTHER; note = 2'-O-methyluridine-3'-phosphate
  modified_base 21: mod_base = OTHER; note = 2'-O-methyluridine-3'-phosphate
  modified_base 22: mod_base = OTHER; note = 2'-O-methylguanosine-3'-phosphate
  modified_base 23: mod_base = OTHER; note = 2'-O-methylguanosine
tttgctctttactgtgatattgg

SEQ ID NO: 4603 - RNA, 23 nt, synthetic construct
  source 1..23: mol_type = other RNA
  modified_base 1: mod_base = OTHER; note = 2'-O-methyluridine-3'-phosphate 5'phosphate
  modified_base 2: mod_base = OTHER; note = 2'-deoxy-2'-fluoroguanosine-3'-phosphate
  modified_base 3: mod_base = OTHER; note = 2'-O-methyluridine-3'-phosphate
  modified_base 4: mod_base = OTHER; note = 2'-O-methyluridine-3'-phosphate
  modified_base 5: mod_base = OTHER; note = 2'-O-methylguanosine-3'-phosphate
  modified_base 6: mod_base = OTHER; note = 2'-deoxy-2'-fluorocytidine-3'-phosphate
  modified_base 7: mod_base = OTHER; note = 2'-O-methyluridine-3'-phosphate
  modified_base 8: mod_base = OTHER; note = 2'-O-methylcytidine-3'-phosphate
  modified_base 9: mod_base = OTHER; note = 2'-O-methyluridine-3'-phosphate
  modified_base 10: mod_base = OTHER; note = 2'-O-methyluridine-3'-phosphate
  modified_base 11: mod_base = OTHER; note = 2'-O-methyluridine-3'-phosphate
  modified_base 12: mod_base = OTHER; note = 2'-O-methyladenosine-3'-phosphate
  modified_base 13: mod_base = OTHER; note = 2'-O-methylcytidine-3'-phosphate
  modified_base 14: mod_base = OTHER; note = 2'-deoxy-2'-fluorouridine-3'-phosphate
  modified_base 15: mod_base = OTHER; note = 2'-O-methylguanosine-3'-phosphate
  modified_base 16: mod_base = OTHER; note = 2'-deoxy-2'-fluorouridine-3'-phosphate
  modified_base 17: mod_base = OTHER; note = 2'-O-methylguanosine-3'-phosphate
  modified_base 18: mod_base = OTHER; note = 2'-O-methyladenosine-3'-phosphate
  modified_base 19: mod_base = OTHER; note = 2'-O-methyluridine-3'-phosphate
  modified_base 20: mod_base = OTHER; note = 2'-O-methyladenosine-3'-phosphate
  modified_base 21: mod_base = OTHER; note = 2'-O-methyluridine-3'-phosphate
  modified_base 22: mod_base = OTHER; note = 2'-O-methyluridine-3'-phosphate
  modified_base 23: mod_base = OTHER; note = 2'-O-methylguanosine
tgttgctctttactgtgatattg

SEQ ID NO: 4604 - RNA, 23 nt, synthetic construct
  source 1..23: mol_type = other RNA
  modified_base 1: mod_base = OTHER; note = 2'-O-methyluridine-3'-phosphate 5'phosphate
  modified_base 2: mod_base = OTHER; note = 2'-deoxy-2'-fluorouridine-3'-phosphate
  modified_base 3: mod_base = OTHER; note = 2'-O-methylguanosine-3'-phosphate
  modified_base 4: mod_base = OTHER; note = 2'-O-methyluridine-3'-phosphate
  modified_base 5: mod_base = OTHER; note = 2'-O-methyluridine-3'-phosphate
  modified_base 6: mod_base = OTHER; note = 2'-deoxy-2'-fluoroguanosine-3'-phosphate
  modified_base 7: mod_base = OTHER; note = 2'-O-methylcytidine-3'-phosphate
  modified_base 8: mod_base = OTHER; note = 2'-O-methyluridine-3'-phosphate
  modified_base 9: mod_base = OTHER; note = 2'-O-methylcytidine-3'-phosphate
  modified_base 10: mod_base = OTHER; note = 2'-O-methyluridine-3'-phosphate
  modified_base 11: mod_base = OTHER; note = 2'-O-methyluridine-3'-phosphate
  modified_base 12: mod_base = OTHER; note = 2'-O-methyluridine-3'-phosphate
  modified_base 13: mod_base = OTHER; note = 2'-O-methyladenosine-3'-phosphate
  modified_base 14: mod_base = OTHER; note = 2'-deoxy-2'-fluorocytidine-3'-phosphate
  modified_base 15: mod_base = OTHER; note = 2'-O-methyluridine-3'-phosphate
  modified_base 16: mod_base = OTHER; note = 2'-deoxy-2'-fluoroguanosine-3'-phosphate
  modified_base 17: mod_base = OTHER; note = 2'-O-methyluridine-3'-phosphate
  modified_base 18: mod_base = OTHER; note = 2'-O-methylguanosine-3'-phosphate
  modified_base 19: mod_base = OTHER; note = 2'-O-methyladenosine-3'-phosphate
  modified_base 20: mod_base = OTHER; note = 2'-O-methyluridine-3'-phosphate
  modified_base 21: mod_base = OTHER; note = 2'-O-methyladenosine-3'-phosphate
  modified_base 22: mod_base = OTHER; note = 2'-O-methyluridine-3'-phosphate
  modified_base 23: mod_base = OTHER; note = 2'-O-methyluridine
ttgttgctctttactgtgatatt

SEQ ID NO: 4605 - RNA, 23 nt, synthetic construct
  source 1..23: mol_type = other RNA
  modified_base 1: mod_base = OTHER; note = 2'-O-methyluridine-3'-phosphate 5'phosphate
  modified_base 2: mod_base = OTHER; note = 2'-deoxy-2'-fluorouridine-3'-phosphate
  modified_base 3: mod_base = OTHER; note = 2'-O-methyluridine-3'-phosphate
  modified_base 4: mod_base = OTHER; note = 2'-O-methylguanosine-3'-phosphate
  modified_base 5: mod_base = OTHER; note = 2'-O-methyluridine-3'-phosphate
  modified_base 6: mod_base = OTHER; note = 2'-deoxy-2'-fluorouridine-3'-phosphate
  modified_base 7: mod_base = OTHER; note = 2'-O-methylguanosine-3'-phosphate
  modified_base 8: mod_base = OTHER; note = 2'-O-methylcytidine-3'-phosphate
  modified_base 9: mod_base = OTHER; note = 2'-O-methyluridine-3'-phosphate
  modified_base 10: mod_base = OTHER; note = 2'-O-methylcytidine-3'-phosphate
  modified_base 11: mod_base = OTHER; note = 2'-O-methyluridine-3'-phosphate
  modified_base 12: mod_base = OTHER; note = 2'-O-methyluridine-3'-phosphate
  modified_base 13: mod_base = OTHER; note = 2'-O-methyluridine-3'-phosphate
  modified_base 14: mod_base = OTHER; note = 2'-deoxy-2'-fluoroadenosine-3'-phosphate
  modified_base 15: mod_base = OTHER; note = 2'-O-methylcytidine-3'-phosphate
  modified_base 16: mod_base = OTHER; note = 2'-deoxy-2'-fluorouridine-3'-phosphate
  modified_base 17: mod_base = OTHER; note = 2'-O-methylguanosine-3'-phosphate
  modified_base 18: mod_base = OTHER; note = 2'-O-methyluridine-3'-phosphate
  modified_base 19: mod_base = OTHER; note = 2'-O-methylguanosine-3'-phosphate
  modified_base 20: mod_base = OTHER; note = 2'-O-methyladenosine-3'-phosphate
  modified_base 21: mod_base = OTHER; note = 2'-O-methyluridine-3'-phosphate
  modified_base 22: mod_base = OTHER; note = 2'-O-methyladenosine-3'-phosphate
  modified_base 23: mod_base = OTHER; note = 2'-O-methyluridine
tttgttgctctttactgtgatat

SEQ ID NO: 4606 - RNA, 23 nt, synthetic construct
  source 1..23: mol_type = other RNA
  modified_base 1: mod_base = OTHER; note = 2'-O-methyluridine-3'-phosphate 5'phosphate
  modified_base 2: mod_base = OTHER; note = 2'-deoxy-2'-fluoroadenosine-3'-phosphate
  modified_base 3: mod_base = OTHER; note = 2'-O-methyluridine-3'-phosphate
  modified_base 4: mod_base = OTHER; note = 2'-O-methyluridine-3'-phosphate
  modified_base 5: mod_base = OTHER; note = 2'-O-methylguanosine-3'-phosphate
  modified_base 6: mod_base = OTHER; note = 2'-deoxy-2'-fluorouridine-3'-phosphate
  modified_base 7: mod_base = OTHER; note = 2'-O-methyluridine-3'-phosphate
  modified_base 8: mod_base = OTHER; note = 2'-O-methylguanosine-3'-phosphate
  modified_base 9: mod_base = OTHER; note = 2'-O-methylcytidine-3'-phosphate
  modified_base 10: mod_base = OTHER; note = 2'-O-methyluridine-3'-phosphate
  modified_base 11: mod_base = OTHER; note = 2'-O-methylcytidine-3'-phosphate
  modified_base 12: mod_base = OTHER; note = 2'-O-methyluridine-3'-phosphate
  modified_base 13: mod_base = OTHER; note = 2'-O-methyluridine-3'-phosphate
  modified_base 14: mod_base = OTHER; note = 2'-deoxy-2'-fluorouridine-3'-phosphate
  modified_base 15: mod_base = OTHER; note = 2'-O-methyladenosine-3'-phosphate
  modified_base 16: mod_base = OTHER; note = 2'-deoxy-2'-fluorocytidine-3'-phosphate
  modified_base 17: mod_base = OTHER; note = 2'-O-methyluridine-3'-phosphate
  modified_base 18: mod_base = OTHER; note = 2'-O-methylguanosine-3'-phosphate
  modified_base 19: mod_base = OTHER; note = 2'-O-methyluridine-3'-phosphate
  modified_base 20: mod_base = OTHER; note = 2'-O-methylguanosine-3'-phosphate
  modified_base 21: mod_base = OTHER; note = 2'-O-methyladenosine-3'-phosphate
  modified_base 22: mod_base = OTHER; note = 2'-O-methyluridine-3'-phosphate
  modified_base 23: mod_base = OTHER; note = 2'-O-methyladenosine
tattgttgctctttactgtgata

SEQ ID NO: 4607 - RNA, 23 nt, synthetic construct
  source 1..23: mol_type = other RNA
  modified_base 1: mod_base = OTHER; note = 2'-O-methyluridine-3'-phosphate 5'phosphate
  modified_base 2: mod_base = OTHER; note = 2'-deoxy-2'-fluorocytidine-3'-phosphate
  modified_base 3: mod_base = OTHER; note = 2'-O-methyladenosine-3'-phosphate
  modified_base 4: mod_base = OTHER; note = 2'-O-methyluridine-3'-phosphate
  modified_base 5: mod_base = OTHER; note = 2'-O-methyluridine-3'-phosphate
  modified_base 6: mod_base = OTHER; note = 2'-deoxy-2'-fluoroguanosine-3'-phosphate
  modified_base 7: mod_base = OTHER; note = 2'-O-methyluridine-3'-phosphate
  modified_base 8: mod_base = OTHER; note = 2'-O-methyluridine-3'-phosphate
  modified_base 9: mod_base = OTHER; note = 2'-O-methylguanosine-3'-phosphate
  modified_base 10: mod_base = OTHER; note = 2'-O-methylcytidine-3'-phosphate
  modified_base 11: mod_base = OTHER; note = 2'-O-methyluridine-3'-phosphate
  modified_base 12: mod_base = OTHER; note = 2'-O-methylcytidine-3'-phosphate
  modified_base 13: mod_base = OTHER; note = 2'-O-methyluridine-3'-phosphate
  modified_base 14: mod_base = OTHER; note = 2'-deoxy-2'-fluorouridine-3'-phosphate
  modified_base 15: mod_base = OTHER; note = 2'-O-methyluridine-3'-phosphate
  modified_base 16: mod_base = OTHER; note = 2'-deoxy-2'-fluoroadenosine-3'-phosphate
  modified_base 17: mod_base = OTHER; note = 2'-O-methylcytidine-3'-phosphate
  modified_base 18: mod_base = OTHER; note = 2'-O-methyluridine-3'-phosphate
  modified_base 19: mod_base = OTHER; note = 2'-O-methylguanosine-3'-phosphate
  modified_base 20: mod_base = OTHER; note = 2'-O-methyluridine-3'-phosphate
  modified_base 21: mod_base = OTHER; note = 2'-O-methylguanosine-3'-phosphate
  modified_base 22: mod_base = OTHER; note = 2'-O-methyladenosine-3'-phosphate
  modified_base 23: mod_base = OTHER; note = 2'-O-methyluridine
tcattgttgctctttactgtgat

SEQ ID NO: 4608 - RNA, 23 nt, synthetic construct
  source 1..23: mol_type = other RNA
  modified_base 1: mod_base = OTHER; note = 2'-O-methyluridine-3'-phosphate 5'phosphate
  modified_base 2: mod_base = OTHER; note = 2'-deoxy-2'-fluoroadenosine-3'-phosphate
  modified_base 3: mod_base = OTHER; note = 2'-O-methylcytidine-3'-phosphate
  modified_base 4: mod_base = OTHER; note = 2'-O-methyladenosine-3'-phosphate
  modified_base 5: mod_base = OTHER; note = 2'-O-methyluridine-3'-phosphate
  modified_base 6: mod_base = OTHER; note = 2'-deoxy-2'-fluorouridine-3'-phosphate
  modified_base 7: mod_base = OTHER; note = 2'-O-methylguanosine-3'-phosphate
  modified_base 8: mod_base = OTHER; note = 2'-O-methyluridine-3'-phosphate
  modified_base 9: mod_base = OTHER; note = 2'-O-methyluridine-3'-phosphate
  modified_base 10: mod_base = OTHER; note = 2'-O-methylguanosine-3'-phosphate
  modified_base 11: mod_base = OTHER; note = 2'-O-methylcytidine-3'-phosphate
  modified_base 12: mod_base = OTHER; note = 2'-O-methyluridine-3'-phosphate
  modified_base 13: mod_base = OTHER; note = 2'-O-methylcytidine-3'-phosphate
  modified_base 14: mod_base = OTHER; note = 2'-deoxy-2'-fluorouridine-3'-phosphate
  modified_base 15: mod_base = OTHER; note = 2'-O-methyluridine-3'-phosphate
  modified_base 16: mod_base = OTHER; note = 2'-deoxy-2'-fluorouridine-3'-phosphate
  modified_base 17: mod_base = OTHER; note = 2'-O-methyladenosine-3'-phosphate
  modified_base 18: mod_base = OTHER; note = 2'-O-methylcytidine-3'-phosphate
  modified_base 19: mod_base = OTHER; note = 2'-O-methyluridine-3'-phosphate
  modified_base 20: mod_base = OTHER; note = 2'-O-methylguanosine-3'-phosphate
  modified_base 21: mod_base = OTHER; note = 2'-O-methyluridine-3'-phosphate
  modified_base 22: mod_base = OTHER; note = 2'-O-methylguanosine-3'-phosphate
  modified_base 23: mod_base = OTHER; note = 2'-O-methyladenosine
tacattgttgctctttactgtga

SEQ ID NO: 4609 - RNA, 23 nt, synthetic construct
  source 1..23: mol_type = other RNA
  modified_base 1: mod_base = OTHER; note = 2'-O-methyluridine-3'-phosphate 5'phosphate
  modified_base 2: mod_base = OTHER; note = 2'-deoxy-2'-fluorocytidine-3'-phosphate
  modified_base 3: mod_base = OTHER; note = 2'-O-methyladenosine-3'-phosphate
  modified_base 4: mod_base = OTHER; note = 2'-O-methylcytidine-3'-phosphate
  modified_base 5: mod_base = OTHER; note = 2'-O-methyladenosine-3'-phosphate
  modified_base 6: mod_base = OTHER; note = 2'-deoxy-2'-fluorouridine-3'-phosphate
  modified_base 7: mod_base = OTHER; note = 2'-O-methyluridine-3'-phosphate
  modified_base 8: mod_base = OTHER; note = 2'-O-methylguanosine-3'-phosphate
  modified_base 9: mod_base = OTHER; note = 2'-O-methyluridine-3'-phosphate
  modified_base 10: mod_base = OTHER; note = 2'-O-methyluridine-3'-phosphate
  modified_base 11: mod_base = OTHER; note = 2'-O-methylguanosine-3'-phosphate
  modified_base 12: mod_base = OTHER; note = 2'-O-methylcytidine-3'-phosphate
  modified_base 13: mod_base = OTHER; note = 2'-O-methyluridine-3'-phosphate
  modified_base 14: mod_base = OTHER; note = 2'-deoxy-2'-fluorocytidine-3'-phosphate
  modified_base 15: mod_base = OTHER; note = 2'-O-methyluridine-3'-phosphate
  modified_base 16: mod_base = OTHER; note = 2'-deoxy-2'-fluorouridine-3'-phosphate
  modified_base 17: mod_base = OTHER; note = 2'-O-methyluridine-3'-phosphate
  modified_base 18: mod_base = OTHER; note = 2'-O-methyladenosine-3'-phosphate
  modified_base 19: mod_base = OTHER; note = 2'-O-methylcytidine-3'-phosphate
  modified_base 20: mod_base = OTHER; note = 2'-O-methyluridine-3'-phosphate
  modified_base 21: mod_base = OTHER; note = 2'-O-methylguanosine-3'-phosphate
  modified_base 22: mod_base = OTHER; note = 2'-O-methyluridine-3'-phosphate
  modified_base 23: mod_base = OTHER; note = 2'-O-methylguanosine
tcacattgttgctctttactgtg

SEQ ID NO: 4610 - RNA, 23 nt, synthetic construct
  source 1..23: mol_type = other RNA
  modified_base 1: mod_base = OTHER; note = 2'-O-methyluridine-3'-phosphate 5'phosphate
  modified_base 2: mod_base = OTHER; note = 2'-deoxy-2'-fluoroadenosine-3'-phosphate
  modified_base 3: mod_base = OTHER; note = 2'-O-methylcytidine-3'-phosphate
  modified_base 4: mod_base = OTHER; note = 2'-O-methyladenosine-3'-phosphate
  modified_base 5: mod_base = OTHER; note = 2'-O-methylcytidine-3'-phosphate
  modified_base 6: mod_base = OTHER; note = 2'-deoxy-2'-fluoroadenosine-3'-phosphate
  modified_base 7: mod_base = OTHER; note = 2'-O-methyluridine-3'-phosphate
  modified_base 8: mod_base = OTHER; note = 2'-O-methyluridine-3'-phosphate
  modified_base 9: mod_base = OTHER; note = 2'-O-methylguanosine-3'-phosphate
  modified_base 10: mod_base = OTHER; note = 2'-O-methyluridine-3'-phosphate
  modified_base 11: mod_base = OTHER; note = 2'-O-methyluridine-3'-phosphate
  modified_base 12: mod_base = OTHER; note = 2'-O-methylguanosine-3'-phosphate
  modified_base 13: mod_base = OTHER; note = 2'-O-methylcytidine-3'-phosphate
  modified_base 14: mod_base = OTHER; note = 2'-deoxy-2'-fluorouridine-3'-phosphate
  modified_base 15: mod_base = OTHER; note = 2'-O-methylcytidine-3'-phosphate
  modified_base 16: mod_base = OTHER; note = 2'-deoxy-2'-fluorouridine-3'-phosphate
  modified_base 17: mod_base = OTHER; note = 2'-O-methyluridine-3'-phosphate
  modified_base 18: mod_base = OTHER; note = 2'-O-methyluridine-3'-phosphate
  modified_base 19: mod_base = OTHER; note = 2'-O-methyladenosine-3'-phosphate
  modified_base 20: mod_base = OTHER; note = 2'-O-methylcytidine-3'-phosphate
  modified_base 21: mod_base = OTHER; note = 2'-O-methyluridine-3'-phosphate
  modified_base 22: mod_base = OTHER; note = 2'-O-methylguanosine-3'-phosphate
  modified_base 23: mod_base = OTHER; note = 2'-O-methyluridine
tacacattgttgctctttactgt

SEQ ID NO: 4611 - RNA, 23 nt, synthetic construct
  source 1..23: mol_type = other RNA
  modified_base 1: mod_base = OTHER; note = 2'-O-methyluridine-3'-phosphate 5'phosphate
  modified_base 2: mod_base = OTHER; note = 2'-deoxy-2'-fluorouridine-3'-phosphate
  modified_base 3: mod_base = OTHER; note = 2'-O-methyladenosine-3'-phosphate
  modified_base 4: mod_base = OTHER; note = 2'-O-methyladenosine-3'-phosphate
  modified_base 5: mod_base = OTHER; note = 2'-O-methyladenosine-3'-phosphate
  modified_base 6: mod_base = OTHER; note = 2'-deoxy-2'-fluoroadenosine-3'-phosphate
  modified_base 7: mod_base = OTHER; note = 2'-O-methylcytidine-3'-phosphate
  modified_base 8: mod_base = OTHER; note = 2'-O-methyluridine-3'-phosphate
  modified_base 9: mod_base = OTHER; note = 2'-O-methyladenosine-3'-phosphate
  modified_base 10: mod_base = OTHER; note = 2'-O-methylcytidine-3'-phosphate
  modified_base 11: mod_base = OTHER; note = 2'-O-methyladenosine-3'-phosphate
  modified_base 12: mod_base = OTHER; note = 2'-O-methyluridine-3'-phosphate
  modified_base 13: mod_base = OTHER; note = 2'-O-methylcytidine-3'-phosphate
  modified_base 14: mod_base = OTHER; note = 2'-deoxy-2'-fluorouridine-3'-phosphate
  modified_base 15: mod_base = OTHER; note = 2'-O-methylcytidine-3'-phosphate
  modified_base 16: mod_base = OTHER; note = 2'-deoxy-2'-fluorouridine-3'-phosphate
  modified_base 17: mod_base = OTHER; note = 2'-O-methylcytidine-3'-phosphate
  modified_base 18: mod_base = OTHER; note = 2'-O-methyladenosine-3'-phosphate
  modified_base 19: mod_base = OTHER; note = 2'-O-methyluridine-3'-phosphate
  modified_base 20: mod_base = OTHER; note = 2'-O-methylcytidine-3'-phosphate
  modified_base 21: mod_base = OTHER; note = 2'-O-methylcytidine-3'-phosphate
  modified_base 22: mod_base = OTHER; note = 2'-O-methyluridine-3'-phosphate
  modified_base 23: mod_base = OTHER; note = 2'-O-methyladenosine
ttaaaactacatctctcatccta

SEQ ID NO: 4612 - RNA, 23 nt, synthetic construct
  source 1..23: mol_type = other RNA
  modified_base 1: mod_base = OTHER; note = 2'-O-methyluridine-3'-phosphate 5'phosphate
  modified_base 2: mod_base = OTHER; note = 2'-deoxy-2'-fluoroadenosine-3'-phosphate
  modified_base 3: mod_base = OTHER; note = 2'-O-methyluridine-3'-phosphate
  modified_base 4: mod_base = OTHER; note = 2'-O-methyladenosine-3'-phosphate
  modified_base 5: mod_base = OTHER; note = 2'-O-methyladenosine-3'-phosphate
  modified_base 6: mod_base = OTHER; note = 2'-deoxy-2'-fluoroadenosine-3'-phosphate
  modified_base 7: mod_base = OTHER; note = 2'-O-methyladenosine-3'-phosphate
  modified_base 8: mod_base = OTHER; note = 2'-O-methylcytidine-3'-phosphate
  modified_base 9: mod_base = OTHER; note = 2'-O-methyluridine-3'-phosphate
  modified_base 10: mod_base = OTHER; note = 2'-O-methyladenosine-3'-phosphate
  modified_base 11: mod_base = OTHER; note = 2'-O-methylcytidine-3'-phosphate
  modified_base 12: mod_base = OTHER; note = 2'-O-methyladenosine-3'-phosphate
  modified_base 13: mod_base = OTHER; note = 2'-O-methyluridine-3'-phosphate
  modified_base 14: mod_base = OTHER; note = 2'-deoxy-2'-fluorocytidine-3'-phosphate
  modified_base 15: mod_base = OTHER; note = 2'-O-methyluridine-3'-phosphate
  modified_base 16: mod_base = OTHER; note = 2'-deoxy-2'-fluorocytidine-3'-phosphate
  modified_base 17: mod_base = OTHER; note = 2'-O-methyluridine-3'-phosphate
  modified_base 18: mod_base = OTHER; note = 2'-O-methylcytidine-3'-phosphate
  modified_base 19: mod_base = OTHER; note = 2'-O-methyladenosine-3'-phosphate
  modified_base 20: mod_base = OTHER; note = 2'-O-methyluridine-3'-phosphate
  modified_base 21: mod_base = OTHER; note = 2'-O-methylcytidine-3'-phosphate
  modified_base 22: mod_base = OTHER; note = 2'-O-methylcytidine-3'-phosphate
  modified_base 23: mod_base = OTHER; note = 2'-O-methyluridine
tataaaactacatctctcatcct

SEQ ID NO: 4613 - RNA, 23 nt, synthetic construct
  source 1..23: mol_type = other RNA
  modified_base 1: mod_base = OTHER; note = 2'-O-methyluridine-3'-phosphate 5'phosphate
  modified_base 2: mod_base = OTHER; note = 2'-deoxy-2'-fluoroadenosine-3'-phosphate
  modified_base 3: mod_base = OTHER; note = 2'-O-methyladenosine-3'-phosphate
  modified_base 4: mod_base = OTHER; note = 2'-O-methyluridine-3'-phosphate
  modified_base 5: mod_base = OTHER; note = 2'-O-methyladenosine-3'-phosphate
  modified_base 6: mod_base = OTHER; note = 2'-deoxy-2'-fluoroadenosine-3'-phosphate
  modified_base 7: mod_base = OTHER; note = 2'-O-methyladenosine-3'-phosphate
  modified_base 8: mod_base = OTHER; note = 2'-O-methyladenosine-3'-phosphate
  modified_base 9: mod_base = OTHER; note = 2'-O-methylcytidine-3'-phosphate
  modified_base 10: mod_base = OTHER; note = 2'-O-methyluridine-3'-phosphate
  modified_base 11: mod_base = OTHER; note = 2'-O-methyladenosine-3'-phosphate
  modified_base 12: mod_base = OTHER; note = 2'-O-methylcytidine-3'-phosphate
  modified_base 13: mod_base = OTHER; note = 2'-O-methyladenosine-3'-phosphate
  modified_base 14: mod_base = OTHER; note = 2'-deoxy-2'-fluorouridine-3'-phosphate
  modified_base 15: mod_base = OTHER; note = 2'-O-methylcytidine-3'-phosphate
  modified_base 16: mod_base = OTHER; note = 2'-deoxy-2'-fluorouridine-3'-phosphate
  modified_base 17: mod_base = OTHER; note = 2'-O-methylcytidine-3'-phosphate
  modified_base 18: mod_base = OTHER; note = 2'-O-methyluridine-3'-phosphate
  modified_base 19: mod_base = OTHER; note = 2'-O-methylcytidine-3'-phosphate
  modified_base 20: mod_base = OTHER; note = 2'-O-methyladenosine-3'-phosphate
  modified_base 21: mod_base = OTHER; note = 2'-O-methyluridine-3'-phosphate
  modified_base 22: mod_base = OTHER; note = 2'-O-methylcytidine-3'-phosphate
  modified_base 23: mod_base = OTHER; note = 2'-O-methylcytidine
taataaaactacatctctcatcc

SEQ ID NO: 4614 - RNA, 23 nt, synthetic construct
  source 1..23: mol_type = other RNA
  modified_base 1: mod_base = OTHER; note = 2'-O-methyluridine-3'-phosphate 5'phosphate
  modified_base 2: mod_base = OTHER; note = 2'-deoxy-2'-fluoroadenosine-3'-phosphate
  modified_base 3: mod_base = OTHER; note = 2'-O-methyladenosine-3'-phosphate
  modified_base 4: mod_base = OTHER; note = 2'-O-methyladenosine-3'-phosphate
  modified_base 5: mod_base = OTHER; note = 2'-O-methyluridine-3'-phosphate
  modified_base 6: mod_base = OTHER; note = 2'-deoxy-2'-fluoroadenosine-3'-phosphate
  modified_base 7: mod_base = OTHER; note = 2'-O-methyladenosine-3'-phosphate
  modified_base 8: mod_base = OTHER; note = 2'-O-methyladenosine-3'-phosphate
  modified_base 9: mod_base = OTHER; note = 2'-O-methyladenosine-3'-phosphate
  modified_base 10: mod_base = OTHER; note = 2'-O-methylcytidine-3'-phosphate
  modified_base 11: mod_base = OTHER; note = 2'-O-methyluridine-3'-phosphate
  modified_base 12: mod_base = OTHER; note = 2'-O-methyladenosine-3'-phosphate
  modified_base 13: mod_base = OTHER; note = 2'-O-methylcytidine-3'-phosphate
  modified_base 14: mod_base = OTHER; note = 2'-deoxy-2'-fluoroadenosine-3'-phosphate
  modified_base 15: mod_base = OTHER; note = 2'-O-methyluridine-3'-phosphate
  modified_base 16: mod_base = OTHER; note = 2'-deoxy-2'-fluorocytidine-3'-phosphate
  modified_base 17: mod_base = OTHER; note = 2'-O-methyluridine-3'-phosphate
  modified_base 18: mod_base = OTHER; note = 2'-O-methylcytidine-3'-phosphate
  modified_base 19: mod_base = OTHER; note = 2'-O-methyluridine-3'-phosphate
  modified_base 20: mod_base = OTHER; note = 2'-O-methylcytidine-3'-phosphate
  modified_base 21: mod_base = OTHER; note = 2'-O-methyladenosine-3'-phosphate
  modified_base 22: mod_base = OTHER; note = 2'-O-methyluridine-3'-phosphate
  modified_base 23: mod_base = OTHER; note = 2'-O-methylcytidine
taaataaaactacatctctcatc

SEQ ID NO: 4615 - RNA, 23 nt, synthetic construct
  source 1..23: mol_type = other RNA
  modified_base 1: mod_base = OTHER; note = 2'-O-methyluridine-3'-phosphate 5'phosphate
  modified_base 2: mod_base = OTHER; note = 2'-deoxy-2'-fluorocytidine-3'-phosphate
  modified_base 3: mod_base = OTHER; note = 2'-O-methyladenosine-3'-phosphate
  modified_base 4: mod_base = OTHER; note = 2'-O-methyladenosine-3'-phosphate
  modified_base 5: mod_base = OTHER; note = 2'-O-methyladenosine-3'-phosphate
  modified_base 6: mod_base = OTHER; note = 2'-deoxy-2'-fluorouridine-3'-phosphate
  modified_base 7: mod_base = OTHER; note = 2'-O-methyladenosine-3'-phosphate
  modified_base 8: mod_base = OTHER; note = 2'-O-methyladenosine-3'-phosphate
  modified_base 9: mod_base = OTHER; note = 2'-O-methyladenosine-3'-phosphate
  modified_base 10: mod_base = OTHER; note = 2'-O-methyladenosine-3'-phosphate
  modified_base 11: mod_base = OTHER; note = 2'-O-methylcytidine-3'-phosphate
  modified_base 12: mod_base = OTHER; note = 2'-O-methyluridine-3'-phosphate
  modified_base 13: mod_base = OTHER; note = 2'-O-methyladenosine-3'-phosphate
  modified_base 14: mod_base = OTHER; note = 2'-deoxy-2'-fluorocytidine-3'-phosphate
  modified_base 15: mod_base = OTHER; note = 2'-O-methyladenosine-3'-phosphate
  modified_base 16: mod_base = OTHER; note = 2'-deoxy-2'-fluorouridine-3'-phosphate
  modified_base 17: mod_base = OTHER; note = 2'-O-methylcytidine-3'-phosphate
  modified_base 18: mod_base = OTHER; note = 2'-O-methyluridine-3'-phosphate
  modified_base 19: mod_base = OTHER; note = 2'-O-methylcytidine-3'-phosphate
  modified_base 20: mod_base = OTHER; note = 2'-O-methyluridine-3'-phosphate
  modified_base 21: mod_base = OTHER; note = 2'-O-methylcytidine-3'-phosphate
  modified_base 22: mod_base = OTHER; note = 2'-O-methyladenosine-3'-phosphate
  modified_base 23: mod_base = OTHER; note = 2'-O-methyluridine
tcaaataaaactacatctctcat

SEQ ID NO: 4616 - RNA, 23 nt, synthetic construct
  source 1..23: mol_type = other RNA
  modified_base 1: mod_base = OTHER; note = 2'-O-methyluridine-3'-phosphate 5'phosphate
  modified_base 2: mod_base = OTHER; note = 2'-deoxy-2'-fluorouridine-3'-phosphate
  modified_base 3: mod_base = OTHER; note = 2'-O-methylcytidine-3'-phosphate
  modified_base 4: mod_base = OTHER; note = 2'-O-methyladenosine-3'-phosphate
  modified_base 5: mod_base = OTHER; note = 2'-O-methyladenosine-3'-phosphate
  modified_base 6: mod_base = OTHER; note = 2'-deoxy-2'-fluoroadenosine-3'-phosphate
  modified_base 7: mod_base = OTHER; note = 2'-O-methyluridine-3'-phosphate
  modified_base 8: mod_base = OTHER; note = 2'-O-methyladenosine-3'-phosphate
  modified_base 9: mod_base = OTHER; note = 2'-O-methyladenosine-3'-phosphate
  modified_base 10: mod_base = OTHER; note = 2'-O-methyladenosine-3'-phosphate
  modified_base 11: mod_base = OTHER; note = 2'-O-methyladenosine-3'-phosphate
  modified_base 12: mod_base = OTHER; note = 2'-O-methylcytidine-3'-phosphate
  modified_base 13: mod_base = OTHER; note = 2'-O-methyluridine-3'-phosphate
  modified_base 14: mod_base = OTHER; note = 2'-deoxy-2'-fluoroadenosine-3'-phosphate
  modified_base 15: mod_base = OTHER; note = 2'-O-methylcytidine-3'-phosphate
  modified_base 16: mod_base = OTHER; note = 2'-deoxy-2'-fluoroadenosine-3'-phosphate
  modified_base 17: mod_base = OTHER; note = 2'-O-methyluridine-3'-phosphate
  modified_base 18: mod_base = OTHER; note = 2'-O-methylcytidine-3'-phosphate
  modified_base 19: mod_base = OTHER; note = 2'-O-methyluridine-3'-phosphate
  modified_base 20: mod_base = OTHER; note = 2'-O-methylcytidine-3'-phosphate
  modified_base 21: mod_base = OTHER; note = 2'-O-methyluridine-3'-phosphate
  modified_base 22: mod_base = OTHER; note = 2'-O-methylcytidine-3'-phosphate
  modified_base 23: mod_base = OTHER; note = 2'-O-methyladenosine
ttcaaataaaactacatctctca

SEQ ID NO: 4617 - RNA, 23 nt, synthetic construct
  source 1..23: mol_type = other RNA
  modified_base 1: mod_base = OTHER; note = 2'-O-methyluridine-3'-phosphate 5'phosphate
  modified_base 2: mod_base = OTHER; note = 2'-deoxy-2'-fluorouridine-3'-phosphate
  modified_base 3: mod_base = OTHER; note = 2'-O-methyluridine-3'-phosphate
  modified_base 4: mod_base = OTHER; note = 2'-O-methylcytidine-3'-phosphate
  modified_base 5: mod_base = OTHER; note = 2'-O-methyladenosine-3'-phosphate
  modified_base 6: mod_base = OTHER; note = 2'-deoxy-2'-fluoroadenosine-3'-phosphate
  modified_base 7: mod_base = OTHER; note = 2'-O-methyladenosine-3'-phosphate
  modified_base 8: mod_base = OTHER; note = 2'-O-methyluridine-3'-phosphate
  modified_base 9: mod_base = OTHER; note = 2'-O-methyladenosine-3'-phosphate
  modified_base 10: mod_base = OTHER; note = 2'-O-methyladenosine-3'-phosphate
  modified_base 11: mod_base = OTHER; note = 2'-O-methyladenosine-3'-phosphate
  modified_base 12: mod_base = OTHER; note = 2'-O-methyladenosine-3'-phosphate
  modified_base 13: mod_base = OTHER; note = 2'-O-methylcytidine-3'-phosphate
  modified_base 14: mod_base = OTHER; note = 2'-deoxy-2'-fluorouridine-3'-phosphate
  modified_base 15: mod_base = OTHER; note = 2'-O-methyladenosine-3'-phosphate
  modified_base 16: mod_base = OTHER; note = 2'-deoxy-2'-fluorocytidine-3'-phosphate
  modified_base 17: mod_base = OTHER; note = 2'-O-methyladenosine-3'-phosphate
  modified_base 18: mod_base = OTHER; note = 2'-O-methyluridine-3'-phosphate
  modified_base 19: mod_base = OTHER; note = 2'-O-methylcytidine-3'-phosphate
  modified_base 20: mod_base = OTHER; note = 2'-O-methyluridine-3'-phosphate
  modified_base 21: mod_base = OTHER; note = 2'-O-methylcytidine-3'-phosphate
  modified_base 22: mod_base = OTHER; note = 2'-O-methyluridine-3'-phosphate
  modified_base 23: mod_base = OTHER; note = 2'-O-methylcytidine
tttcaaataaaactacatctctc

SEQ ID NO: 4618 - RNA, 23 nt, synthetic construct
  source 1..23: mol_type = other RNA
  modified_base 1: mod_base = OTHER; note = 2'-O-methyluridine-3'-phosphate 5'phosphate
  modified_base 2: mod_base = OTHER; note = 2'-deoxy-2'-fluorouridine-3'-phosphate
  modified_base 3: mod_base = OTHER; note = 2'-O-methyluridine-3'-phosphate
  modified_base 4: mod_base = OTHER; note = 2'-O-methyluridine-3'-phosphate
  modified_base 5: mod_base = OTHER; note = 2'-O-methylcytidine-3'-phosphate
  modified_base 6: mod_base = OTHER; note = 2'-deoxy-2'-fluoroadenosine-3'-phosphate
  modified_base 7: mod_base = OTHER; note = 2'-O-methyladenosine-3'-phosphate
  modified_base 8: mod_base = OTHER; note = 2'-O-methyladenosine-3'-phosphate
  modified_base 9: mod_base = OTHER; note = 2'-O-methyluridine-3'-phosphate
  modified_base 10: mod_base = OTHER; note = 2'-O-methyladenosine-3'-phosphate
  modified_base 11: mod_base = OTHER; note = 2'-O-methyladenosine-3'-phosphate
  modified_base 12: mod_base = OTHER; note = 2'-O-methyladenosine-3'-phosphate
  modified_base 13: mod_base = OTHER; note = 2'-O-methyladenosine-3'-phosphate
  modified_base 14: mod_base = OTHER; note = 2'-deoxy-2'-fluorocytidine-3'-phosphate
  modified_base 15: mod_base = OTHER; note = 2'-O-methyluridine-3'-phosphate
  modified_base 16: mod_base = OTHER; note = 2'-deoxy-2'-fluoroadenosine-3'-phosphate
  modified_base 17: mod_base = OTHER; note = 2'-O-methylcytidine-3'-phosphate
  modified_base 18: mod_base = OTHER; note = 2'-O-methyladenosine-3'-phosphate
  modified_base 19: mod_base = OTHER; note = 2'-O-methyluridine-3'-phosphate
  modified_base 20: mod_base = OTHER; note = 2'-O-methylcytidine-3'-phosphate
  modified_base 21: mod_base = OTHER; note = 2'-O-methyluridine-3'-phosphate
  modified_base 22: mod_base = OTHER; note = 2'-O-methylcytidine-3'-phosphate
  modified_base 23: mod_base = OTHER; note = 2'-O-methyluridine
ttttcaaataaaactacatctct

SEQ ID NO: 4619 - RNA, 23 nt, synthetic construct
  source 1..23: mol_type = other RNA
  modified_base 1: mod_base = OTHER; note = 2'-O-methyluridine-3'-phosphate 5'phosphate
  modified_base 2: mod_base = OTHER; note = 2'-deoxy-2'-fluorouridine-3'-phosphate
  modified_base 3: mod_base = OTHER; note = 2'-O-methyluridine-3'-phosphate
  modified_base 4: mod_base = OTHER; note = 2'-O-methyluridine-3'-phosphate
  modified_base 5: mod_base = OTHER; note = 2'-O-methyluridine-3'-phosphate
  modified_base 6: mod_base = OTHER; note = 2'-deoxy-2'-fluorocytidine-3'-phosphate
  modified_base 7: mod_base = OTHER; note = 2'-O-methyladenosine-3'-phosphate
  modified_base 8: mod_base = OTHER; note = 2'-O-methyladenosine-3'-phosphate
  modified_base 9: mod_base = OTHER; note = 2'-O-methyladenosine-3'-phosphate
  modified_base 10: mod_base = OTHER; note = 2'-O-methyluridine-3'-phosphate
  modified_base 11: mod_base = OTHER; note = 2'-O-methyladenosine-3'-phosphate
  modified_base 12: mod_base = OTHER; note = 2'-O-methyladenosine-3'-phosphate
  modified_base 13: mod_base = OTHER; note = 2'-O-methyladenosine-3'-phosphate
  modified_base 14: mod_base = OTHER; note = 2'-deoxy-2'-fluoroadenosine-3'-phosphate
  modified_base 15: mod_base = OTHER; note = 2'-O-methylcytidine-3'-phosphate
  modified_base 16: mod_base = OTHER; note = 2'-deoxy-2'-fluorouridine-3'-phosphate
  modified_base 17: mod_base = OTHER; note = 2'-O-methyladenosine-3'-phosphate
  modified_base 18: mod_base = OTHER; note = 2'-O-methylcytidine-3'-phosphate
  modified_base 19: mod_base = OTHER; note = 2'-O-methyladenosine-3'-phosphate
  modified_base 20: mod_base = OTHER; note = 2'-O-methyluridine-3'-phosphate
  modified_base 21: mod_base = OTHER; note = 2'-O-methylcytidine-3'-phosphate
  modified_base 22: mod_base = OTHER; note = 2'-O-methyluridine-3'-phosphate
  modified_base 23: mod_base = OTHER; note = 2'-O-methylcytidine
tttttcaaataaaactacatctc

SEQ ID NO: 4620 - RNA, 23 nt, synthetic construct
  source 1..23: mol_type = other RNA
  modified_base 1: mod_base = OTHER; note = 2'-O-methyluridine-3'-phosphate 5'phosphate
  modified_base 2: mod_base = OTHER; note = 2'-deoxy-2'-fluorocytidine-3'-phosphate
  modified_base 3: mod_base = OTHER; note = 2'-O-methyluridine-3'-phosphate
  modified_base 4: mod_base = OTHER; note = 2'-O-methyluridine-3'-phosphate
  modified_base 5: mod_base = OTHER; note = 2'-O-methyluridine-3'-phosphate
  modified_base 6: mod_base = OTHER; note = 2'-deoxy-2'-fluorouridine-3'-phosphate
  modified_base 7: mod_base = OTHER; note = 2'-O-methylcytidine-3'-phosphate
  modified_base 8: mod_base = OTHER; note = 2'-O-methyladenosine-3'-phosphate
  modified_base 9: mod_base = OTHER; note = 2'-O-methyladenosine-3'-phosphate
  modified_base 10: mod_base = OTHER; note = 2'-O-methyladenosine-3'-phosphate
  modified_base 11: mod_base = OTHER; note = 2'-O-methyluridine-3'-phosphate
  modified_base 12: mod_base = OTHER; note = 2'-O-methyladenosine-3'-phosphate
  modified_base 13: mod_base = OTHER; note = 2'-O-methyladenosine-3'-phosphate
  modified_base 14: mod_base = OTHER; note = 2'-deoxy-2'-fluoroadenosine-3'-phosphate
  modified_base 15: mod_base = OTHER; note = 2'-O-methyladenosine-3'-phosphate
  modified_base 16: mod_base = OTHER; note = 2'-deoxy-2'-fluorocytidine-3'-phosphate
  modified_base 17: mod_base = OTHER; note = 2'-O-methyluridine-3'-phosphate
  modified_base 18: mod_base = OTHER; note = 2'-O-methyladenosine-3'-phosphate
  modified_base 19: mod_base = OTHER; note = 2'-O-methylcytidine-3'-phosphate
  modified_base 20: mod_base = OTHER; note = 2'-O-methyladenosine-3'-phosphate
  modified_base 21: mod_base = OTHER; note = 2'-O-methyluridine-3'-phosphate
  modified_base 22: mod_base = OTHER; note = 2'-O-methylcytidine-3'-phosphate
  modified_base 23: mod_base = OTHER; note = 2'-O-methyluridine
tcttttcaaataaaactacatct

SEQ ID NO: 4621 - RNA, 23 nt, synthetic construct
  source 1..23: mol_type = other RNA
  modified_base 1: mod_base = OTHER; note = 2'-O-methyluridine-3'-phosphate 5'phosphate
  modified_base 2: mod_base = OTHER; note = 2'-deoxy-2'-fluorouridine-3'-phosphate
  modified_base 3: mod_base = OTHER; note = 2'-O-methylcytidine-3'-phosphate
  modified_base 4: mod_base = OTHER; note = 2'-O-methyluridine-3'-phosphate
  modified_base 5: mod_base = OTHER; note = 2'-O-methyluridine-3'-phosphate
  modified_base 6: mod_base = OTHER; note = 2'-deoxy-2'-fluorouridine-3'-phosphate
  modified_base 7: mod_base = OTHER; note = 2'-O-methyluridine-3'-phosphate
  modified_base 8: mod_base = OTHER; note = 2'-O-methylcytidine-3'-phosphate
  modified_base 9: mod_base = OTHER; note = 2'-O-methyladenosine-3'-phosphate
  modified_base 10: mod_base = OTHER; note = 2'-O-methyladenosine-3'-phosphate
  modified_base 11: mod_base = OTHER; note = 2'-O-methyladenosine-3'-phosphate
  modified_base 12: mod_base = OTHER; note = 2'-O-methyluridine-3'-phosphate
  modified_base 13: mod_base = OTHER; note = 2'-O-methyladenosine-3'-phosphate
  modified_base 14: mod_base = OTHER; note = 2'-deoxy-2'-fluoroadenosine-3'-phosphate
  modified_base 15: mod_base = OTHER; note = 2'-O-methyladenosine-3'-phosphate
  modified_base 16: mod_base = OTHER; note = 2'-deoxy-2'-fluoroadenosine-3'-phosphate
  modified_base 17: mod_base = OTHER; note = 2'-O-methylcytidine-3'-phosphate
  modified_base 18: mod_base = OTHER; note = 2'-O-methyluridine-3'-phosphate
  modified_base 19: mod_base = OTHER; note = 2'-O-methyladenosine-3'-phosphate
  modified_base 20: mod_base = OTHER; note = 2'-O-methylcytidine-3'-phosphate
  modified_base 21: mod_base = OTHER; note = 2'-O-methyladenosine-3'-phosphate
  modified_base 22: mod_base = OTHER; note = 2'-O-methyluridine-3'-phosphate
  modified_base 23: mod_base = OTHER; note = 2'-O-methylcytidine
ttcttttcaaataaaactacatc

SEQ ID NO: 4622 - RNA, 23 nt, synthetic construct
  source 1..23: mol_type = other RNA
  modified_base 1: mod_base = OTHER; note = 2'-O-methyluridine-3'-phosphate 5'phosphate
  modified_base 2: mod_base = OTHER; note = 2'-deoxy-2'-fluorouridine-3'-phosphate
  modified_base 3: mod_base = OTHER; note = 2'-O-methyluridine-3'-phosphate
  modified_base 4: mod_base = OTHER; note = 2'-O-methylcytidine-3'-phosphate
  modified_base 5: mod_base = OTHER; note = 2'-O-methyluridine-3'-phosphate
  modified_base 6: mod_base = OTHER; note = 2'-deoxy-2'-fluorouridine-3'-phosphate
  modified_base 7: mod_base = OTHER; note = 2'-O-methyluridine-3'-phosphate
  modified_base 8: mod_base = OTHER; note = 2'-O-methyluridine-3'-phosphate
  modified_base 9: mod_base = OTHER; note = 2'-O-methylcytidine-3'-phosphate
  modified_base 10: mod_base = OTHER; note = 2'-O-methyladenosine-3'-phosphate
  modified_base 11: mod_base = OTHER; note = 2'-O-methyladenosine-3'-phosphate
  modified_base 12: mod_base = OTHER; note = 2'-O-methyladenosine-3'-phosphate
  modified_base 13: mod_base = OTHER; note = 2'-O-methyluridine-3'-phosphate
  modified_base 14: mod_base = OTHER; note = 2'-deoxy-2'-fluoroadenosine-3'-phosphate
  modified_base 15: mod_base = OTHER; note = 2'-O-methyladenosine-3'-phosphate
  modified_base 16: mod_base = OTHER; note = 2'-deoxy-2'-fluoroadenosine-3'-phosphate
  modified_base 17: mod_base = OTHER; note = 2'-O-methyladenosine-3'-phosphate
  modified_base 18: mod_base = OTHER; note = 2'-O-methylcytidine-3'-phosphate
  modified_base 19: mod_base = OTHER; note = 2'-O-methyluridine-3'-phosphate
  modified_base 20: mod_base = OTHER; note = 2'-O-methyladenosine-3'-phosphate
  modified_base 21: mod_base = OTHER; note = 2'-O-methylcytidine-3'-phosphate
  modified_base 22: mod_base = OTHER; note = 2'-O-methyladenosine-3'-phosphate
  modified_base 23: mod_base = OTHER; note = 2'-O-methyluridine
tttcttttcaaataaaactacat

SEQ ID NO: 4623 - RNA, 23 nt, synthetic construct
  source 1..23: mol_type = other RNA
  modified_base 1: mod_base = OTHER; note = 2'-O-methyluridine-3'-phosphate 5'phosphate
  modified_base 2: mod_base = OTHER; note = 2'-deoxy-2'-fluoroadenosine-3'-phosphate
  modified_base 3: mod_base = OTHER; note = 2'-O-methylguanosine-3'-phosphate
  modified_base 4: mod_base = OTHER; note = 2'-O-methyladenosine-3'-phosphate
  modified_base 5: mod_base = OTHER; note = 2'-O-methylguanosine-3'-phosphate
  modified_base 6: mod_base = OTHER; note = 2'-deoxy-2'-fluoroadenosine-3'-phosphate
  modified_base 7: mod_base = OTHER; note = 2'-O-methyluridine-3'-phosphate
  modified_base 8: mod_base = OTHER; note = 2'-O-methyladenosine-3'-phosphate
  modified_base 9: mod_base = OTHER; note = 2'-O-methylcytidine-3'-phosphate
  modified_base 10: mod_base = OTHER; note = 2'-O-methyladenosine-3'-phosphate
  modified_base 11: mod_base = OTHER; note = 2'-O-methylcytidine-3'-phosphate
  modified_base 12: mod_base = OTHER; note = 2'-O-methyluridine-3'-phosphate
  modified_base 13: mod_base = OTHER; note = 2'-O-methyluridine-3'-phosphate
  modified_base 14: mod_base = OTHER; note = 2'-deoxy-2'-fluorouridine-3'-phosphate
  modified_base 15: mod_base = OTHER; note = 2'-O-methylcytidine-3'-phosphate
  modified_base 16: mod_base = OTHER; note = 2'-deoxy-2'-fluorouridine-3'-phosphate
  modified_base 17: mod_base = OTHER; note = 2'-O-methyluridine-3'-phosphate
  modified_base 18: mod_base = OTHER; note = 2'-O-methyluridine-3'-phosphate
  modified_base 19: mod_base = OTHER; note = 2'-O-methyluridine-3'-phosphate
  modified_base 20: mod_base = OTHER; note = 2'-O-methylcytidine-3'-phosphate
  modified_base 21: mod_base = OTHER; note = 2'-O-methyladenosine-3'-phosphate
  modified_base 22: mod_base = OTHER; note = 2'-O-methyladenosine-3'-phosphate
  modified_base 23: mod_base = OTHER; note = 2'-O-methyladenosine
tagagatacactttcttttcaaa

SEQ ID NO: 4624 - RNA, 23 nt, synthetic construct
  source 1..23: mol_type = other RNA
  modified_base 1: mod_base = OTHER; note = 2'-O-methyluridine-3'-phosphate 5'phosphate
  modified_base 2: mod_base = OTHER; note = 2'-deoxy-2'-fluoroguanosine-3'-phosphate
  modified_base 3: mod_base = OTHER; note = 2'-O-methyladenosine-3'-phosphate
  modified_base 4: mod_base = OTHER; note = 2'-O-methylguanosine-3'-phosphate
  modified_base 5: mod_base = OTHER; note = 2'-O-methyladenosine-3'-phosphate
  modified_base 6: mod_base = OTHER; note = 2'-deoxy-2'-fluoroguanosine-3'-phosphate
  modified_base 7: mod_base = OTHER; note = 2'-O-methyladenosine-3'-phosphate
  modified_base 8: mod_base = OTHER; note = 2'-O-methyluridine-3'-phosphate
  modified_base 9: mod_base = OTHER; note = 2'-O-methyladenosine-3'-phosphate
  modified_base 10: mod_base = OTHER; note = 2'-O-methylcytidine-3'-phosphate
  modified_base 11: mod_base = OTHER; note = 2'-O-methyladenosine-3'-phosphate
  modified_base 12: mod_base = OTHER; note = 2'-O-methylcytidine-3'-phosphate
  modified_base 13: mod_base = OTHER; note = 2'-O-methyluridine-3'-phosphate
  modified_base 14: mod_base = OTHER; note = 2'-deoxy-2'-fluorouridine-3'-phosphate
  modified_base 15: mod_base = OTHER; note = 2'-O-methyluridine-3'-phosphate
  modified_base 16: mod_base = OTHER; note = 2'-deoxy-2'-fluorocytidine-3'-phosphate
  modified_base 17: mod_base = OTHER; note = 2'-O-methyluridine-3'-phosphate
  modified_base 18: mod_base = OTHER; note = 2'-O-methyluridine-3'-phosphate
  modified_base 19: mod_base = OTHER; note = 2'-O-methyluridine-3'-phosphate
  modified_base 20: mod_base = OTHER; note = 2'-O-methyluridine-3'-phosphate
  modified_base 21: mod_base = OTHER; note = 2'-O-methylcytidine-3'-phosphate
  modified_base 22: mod_base = OTHER; note = 2'-O-methyladenosine-3'-phosphate
  modified_base 23: mod_base = OTHER; note = 2'-O-methyladenosine
tgagagatacactttcttttcaa

SEQ ID NO: 4625 - RNA, 23 nt, synthetic construct
  source 1..23: mol_type = other RNA
  modified_base 1: mod_base = OTHER; note = 2'-O-methyluridine-3'-phosphate 5'phosphate
  modified_base 2: mod_base = OTHER; note = 2'-deoxy-2'-fluorouridine-3'-phosphate
  modified_base 3: mod_base = OTHER; note = 2'-O-methylguanosine-3'-phosphate
  modified_base 4: mod_base = OTHER; note = 2'-O-methyladenosine-3'-phosphate
  modified_base 5: mod_base = OTHER; note = 2'-O-methylguanosine-3'-phosphate
  modified_base 6: mod_base = OTHER; note = 2'-deoxy-2'-fluoroadenosine-3'-phosphate
  modified_base 7: mod_base = OTHER; note = 2'-O-methylguanosine-3'-phosphate
  modified_base 8: mod_base = OTHER; note = 2'-O-methyladenosine-3'-phosphate
  modified_base 9: mod_base = OTHER; note = 2'-O-methyluridine-3'-phosphate
  modified_base 10: mod_base = OTHER; note = 2'-O-methyladenosine-3'-phosphate
  modified_base 11: mod_base = OTHER; note = 2'-O-methylcytidine-3'-phosphate
  modified_base 12: mod_base = OTHER; note = 2'-O-methyladenosine-3'-phosphate
  modified_base 13: mod_base = OTHER; note = 2'-O-methylcytidine-3'-phosphate
  modified_base 14: mod_base = OTHER; note = 2'-deoxy-2'-fluorouridine-3'-phosphate
  modified_base 15: mod_base = OTHER; note = 2'-O-methyluridine-3'-phosphate
  modified_base 16: mod_base = OTHER; note = 2'-deoxy-2'-fluorouridine-3'-phosphate
  modified_base 17: mod_base = OTHER; note = 2'-O-methylcytidine-3'-phosphate
  modified_base 18: mod_base = OTHER; note = 2'-O-methyluridine-3'-phosphate
  modified_base 19: mod_base = OTHER; note = 2'-O-methyluridine-3'-phosphate
  modified_base 20: mod_base = OTHER; note = 2'-O-methyluridine-3'-phosphate
  modified_base 21: mod_base = OTHER; note = 2'-O-methyluridine-3'-phosphate
  modified_base 22: mod_base = OTHER; note = 2'-O-methylcytidine-3'-phosphate
  modified_base 23: mod_base = OTHER; note = 2'-O-methyladenosine
ttgagagatacactttcttttca

SEQ ID NO: 4626 - RNA, 23 nt, synthetic construct
  source 1..23: mol_type = other RNA
  modified_base 1: mod_base = OTHER; note = 2'-O-methyluridine-3'-phosphate 5'phosphate
  modified_base 2: mod_base = OTHER; note = 2'-deoxy-2'-fluorocytidine-3'-phosphate
  modified_base 3: mod_base = OTHER; note = 2'-O-methyluridine-3'-phosphate
  modified_base 4: mod_base = OTHER; note = 2'-O-methylguanosine-3'-phosphate
  modified_base 5: mod_base = OTHER; note = 2'-O-methyladenosine-3'-phosphate
  modified_base 6: mod_base = OTHER; note = 2'-deoxy-2'-fluoroguanosine-3'-phosphate
  modified_base 7: mod_base = OTHER; note = 2'-O-methyladenosine-3'-phosphate
  modified_base 8: mod_base = OTHER; note = 2'-O-methylguanosine-3'-phosphate
  modified_base 9: mod_base = OTHER; note = 2'-O-methyladenosine-3'-phosphate
  modified_base 10: mod_base = OTHER; note = 2'-O-methyluridine-3'-phosphate
  modified_base 11: mod_base = OTHER; note = 2'-O-methyladenosine-3'-phosphate
  modified_base 12: mod_base = OTHER; note = 2'-O-methylcytidine-3'-phosphate
  modified_base 13: mod_base = OTHER; note = 2'-O-methyladenosine-3'-phosphate
  modified_base 14: mod_base = OTHER; note = 2'-deoxy-2'-fluorocytidine-3'-phosphate
  modified_base 15: mod_base = OTHER; note = 2'-O-methyluridine-3'-phosphate
  modified_base 16: mod_base = OTHER; note = 2'-deoxy-2'-fluorouridine-3'-phosphate
  modified_base 17: mod_base = OTHER; note = 2'-O-methyluridine-3'-phosphate
  modified_base 18: mod_base = OTHER; note = 2'-O-methylcytidine-3'-phosphate
  modified_base 19: mod_base = OTHER; note = 2'-O-methyluridine-3'-phosphate
  modified_base 20: mod_base = OTHER; note = 2'-O-methyluridine-3'-phosphate
  modified_base 21: mod_base = OTHER; note = 2'-O-methyluridine-3'-phosphate
  modified_base 22: mod_base = OTHER; note = 2'-O-methyluridine-3'-phosphate
  modified_base 23: mod_base = OTHER; note = 2'-O-methylcytidine
tctgagagatacactttcttttc

SEQ ID NO: 4627 - RNA, 23 nt, synthetic construct
  source 1..23: mol_type = other RNA
  modified_base 1: mod_base = OTHER; note = 2'-O-methyluridine-3'-phosphate 5'phosphate
  modified_base 2: mod_base = OTHER; note = 2'-deoxy-2'-fluorouridine-3'-phosphate
  modified_base 3: mod_base = OTHER; note = 2'-O-methylcytidine-3'-phosphate
  modified_base 4: mod_base = OTHER; note = 2'-O-methyluridine-3'-phosphate
  modified_base 5: mod_base = OTHER; note = 2'-O-methylguanosine-3'-phosphate
  modified_base 6: mod_base = OTHER; note = 2'-deoxy-2'-fluoroadenosine-3'-phosphate
  modified_base 7: mod_base = OTHER; note = 2'-O-methylguanosine-3'-phosphate
  modified_base 8: mod_base = OTHER; note = 2'-O-methyladenosine-3'-phosphate
  modified_base 9: mod_base = OTHER; note = 2'-O-methylguanosine-3'-phosphate
  modified_base 10: mod_base = OTHER; note = 2'-O-methyladenosine-3'-phosphate
  modified_base 11: mod_base = OTHER; note = 2'-O-methyluridine-3'-phosphate
  modified_base 12: mod_base = OTHER; note = 2'-O-methyladenosine-3'-phosphate
  modified_base 13: mod_base = OTHER; note = 2'-O-methylcytidine-3'-phosphate
  modified_base 14: mod_base = OTHER; note = 2'-deoxy-2'-fluoroadenosine-3'-phosphate
  modified_base 15: mod_base = OTHER; note = 2'-O-methylcytidine-3'-phosphate
  modified_base 16: mod_base = OTHER; note = 2'-deoxy-2'-fluorouridine-3'-phosphate
  modified_base 17: mod_base = OTHER; note = 2'-O-methyluridine-3'-phosphate
  modified_base 18: mod_base = OTHER; note = 2'-O-methyluridine-3'-phosphate
  modified_base 19: mod_base = OTHER; note = 2'-O-methylcytidine-3'-phosphate
  modified_base 20: mod_base = OTHER; note = 2'-O-methyluridine-3'-phosphate
  modified_base 21: mod_base = OTHER; note = 2'-O-methyluridine-3'-phosphate
  modified_base 22: mod_base = OTHER; note = 2'-O-methyluridine-3'-phosphate
  modified_base 23: mod_base = OTHER; note = 2'-O-methyluridine
ttctgagagatacactttctttt

SEQ ID NO: 4628 - RNA, 23 nt, synthetic construct
  source 1..23: mol_type = other RNA
  modified_base 1: mod_base = OTHER; note = 2'-O-methyluridine-3'-phosphate 5'phosphate
  modified_base 2: mod_base = OTHER; note = 2'-deoxy-2'-fluorocytidine-3'-phosphate
  modified_base 3: mod_base = OTHER; note = 2'-O-methyluridine-3'-phosphate
  modified_base 4: mod_base = OTHER; note = 2'-O-methylcytidine-3'-phosphate
  modified_base 5: mod_base = OTHER; note = 2'-O-methyluridine-3'-phosphate
  modified_base 6: mod_base = OTHER; note = 2'-deoxy-2'-fluoroguanosine-3'-phosphate
  modified_base 7: mod_base = OTHER; note = 2'-O-methyladenosine-3'-phosphate
  modified_base 8: mod_base = OTHER; note = 2'-O-methylguanosine-3'-phosphate
  modified_base 9: mod_base = OTHER; note = 2'-O-methyladenosine-3'-phosphate
  modified_base 10: mod_base = OTHER; note = 2'-O-methylguanosine-3'-phosphate
  modified_base 11: mod_base = OTHER; note = 2'-O-methyladenosine-3'-phosphate
  modified_base 12: mod_base = OTHER; note = 2'-O-methyluridine-3'-phosphate
  modified_base 13: mod_base = OTHER; note = 2'-O-methyladenosine-3'-phosphate
  modified_base 14: mod_base = OTHER; note = 2'-deoxy-2'-fluorocytidine-3'-phosphate
  modified_base 15: mod_base = OTHER; note = 2'-O-methyladenosine-3'-phosphate
  modified_base 16: mod_base = OTHER; note = 2'-deoxy-2'-fluorocytidine-3'-phosphate
  modified_base 17: mod_base = OTHER; note = 2'-O-methyluridine-3'-phosphate
  modified_base 18: mod_base = OTHER; note = 2'-O-methyluridine-3'-phosphate
  modified_base 19: mod_base = OTHER; note = 2'-O-methyluridine-3'-phosphate
  modified_base 20: mod_base = OTHER; note = 2'-O-methylcytidine-3'-phosphate
  modified_base 21: mod_base = OTHER; note = 2'-O-methyluridine-3'-phosphate
  modified_base 22: mod_base = OTHER; note = 2'-O-methyluridine-3'-phosphate
  modified_base 23: mod_base = OTHER; note = 2'-O-methyluridine
tctctgagagatacactttcttt

SEQ ID NO: 4629 - RNA, 23 nt, synthetic construct
  source 1..23: mol_type = other RNA
  modified_base 1: mod_base = OTHER; note = 2'-O-methyluridine-3'-phosphate 5'phosphate
  modified_base 2: mod_base = OTHER; note = 2'-deoxy-2'-fluoroadenosine-3'-phosphate
  modified_base 3: mod_base = OTHER; note = 2'-O-methylcytidine-3'-phosphate
  modified_base 4: mod_base = OTHER; note = 2'-O-methyluridine-3'-phosphate
  modified_base 5: mod_base = OTHER; note = 2'-O-methylcytidine-3'-phosphate
  modified_base 6: mod_base = OTHER; note = 2'-deoxy-2'-fluorouridine-3'-phosphate
  modified_base 7: mod_base = OTHER; note = 2'-O-methylguanosine-3'-phosphate
  modified_base 8: mod_base = OTHER; note = 2'-O-methyladenosine-3'-phosphate
  modified_base 9: mod_base = OTHER; note = 2'-O-methylguanosine-3'-phosphate
  modified_base 10: mod_base = OTHER; note = 2'-O-methyladenosine-3'-phosphate
  modified_base 11: mod_base = OTHER; note = 2'-O-methylguanosine-3'-phosphate
  modified_base 12: mod_base = OTHER; note = 2'-O-methyladenosine-3'-phosphate
  modified_base 13: mod_base = OTHER; note = 2'-O-methyluridine-3'-phosphate
  modified_base 14: mod_base = OTHER; note = 2'-deoxy-2'-fluoroadenosine-3'-phosphate
  modified_base 15: mod_base = OTHER; note = 2'-O-methylcytidine-3'-phosphate
  modified_base 16: mod_base = OTHER; note = 2'-deoxy-2'-fluoroadenosine-3'-phosphate
  modified_base 17: mod_base = OTHER; note = 2'-O-methylcytidine-3'-phosphate
  modified_base 18: mod_base = OTHER; note = 2'-O-methyluridine-3'-phosphate
  modified_base 19: mod_base = OTHER; note = 2'-O-methyluridine-3'-phosphate
  modified_base 20: mod_base = OTHER; note = 2'-O-methyluridine-3'-phosphate
  modified_base 21: mod_base = OTHER; note = 2'-O-methylcytidine-3'-phosphate
  modified_base 22: mod_base = OTHER; note = 2'-O-methyluridine-3'-phosphate
  modified_base 23: mod_base = OTHER; note = 2'-O-methyluridine
tactctgagagatacactttctt

SEQ ID NO: 4630 - RNA, 23 nt, synthetic construct
  source 1..23: mol_type = other RNA
  modified_base 1: mod_base = OTHER; note = 2'-O-methyluridine-3'-phosphate 5'phosphate
  modified_base 2: mod_base = OTHER; note = 2'-deoxy-2'-fluorocytidine-3'-phosphate
  modified_base 3: mod_base = OTHER; note = 2'-O-methyladenosine-3'-phosphate
  modified_base 4: mod_base = OTHER; note = 2'-O-methylcytidine-3'-phosphate
  modified_base 5: mod_base = OTHER; note = 2'-O-methyluridine-3'-phosphate
  modified_base 6: mod_base = OTHER; note = 2'-deoxy-2'-fluorocytidine-3'-phosphate
  modified_base 7: mod_base = OTHER; note = 2'-O-methyluridine-3'-phosphate
  modified_base 8: mod_base = OTHER; note = 2'-O-methylguanosine-3'-phosphate
  modified_base 9: mod_base = OTHER; note = 2'-O-methyladenosine-3'-phosphate
  modified_base 10: mod_base = OTHER; note = 2'-O-methylguanosine-3'-phosphate
  modified_base 11: mod_base = OTHER; note = 2'-O-methyladenosine-3'-phosphate
  modified_base 12: mod_base = OTHER; note = 2'-O-methylguanosine-3'-phosphate
  modified_base 13: mod_base = OTHER; note = 2'-O-methyladenosine-3'-phosphate
  modified_base 14: mod_base = OTHER; note = 2'-deoxy-2'-fluorouridine-3'-phosphate
  modified_base 15: mod_base = OTHER; note = 2'-O-methyladenosine-3'-phosphate
  modified_base 16: mod_base = OTHER; note = 2'-deoxy-2'-fluorocytidine-3'-phosphate
  modified_base 17: mod_base = OTHER; note = 2'-O-methyladenosine-3'-phosphate
  modified_base 18: mod_base = OTHER; note = 2'-O-methylcytidine-3'-phosphate
  modified_base 19: mod_base = OTHER; note = 2'-O-methyluridine-3'-phosphate
  modified_base 20: mod_base = OTHER; note = 2'-O-methyluridine-3'-phosphate
  modified_base 21: mod_base = OTHER; note = 2'-O-methyluridine-3'-phosphate
  modified_base 22: mod_base = OTHER; note = 2'-O-methylcytidine-3'-phosphate
  modified_base 23: mod_base = OTHER; note = 2'-O-methyluridine
tcactctgagagatacactttct

SEQ ID NO: 4631 - RNA, 23 nt, synthetic construct
  source 1..23: mol_type = other RNA
  modified_base 1: mod_base = OTHER; note = 2'-O-methyluridine-3'-phosphate 5'phosphate
  modified_base 2: mod_base = OTHER; note = 2'-deoxy-2'-fluoroguanosine-3'-phosphate
  modified_base 3: mod_base = OTHER; note = 2'-O-methylcytidine-3'-phosphate
  modified_base 4: mod_base = OTHER; note = 2'-O-methyladenosine-3'-phosphate
  modified_base 5: mod_base = OTHER; note = 2'-O-methylcytidine-3'-phosphate
  modified_base 6: mod_base = OTHER; note = 2'-deoxy-2'-fluorouridine-3'-phosphate
  modified_base 7: mod_base = OTHER; note = 2'-O-methylcytidine-3'-phosphate
  modified_base 8: mod_base = OTHER; note = 2'-O-methyluridine-3'-phosphate
  modified_base 9: mod_base = OTHER; note = 2'-O-methylguanosine-3'-phosphate
  modified_base 10: mod_base = OTHER; note = 2'-O-methyladenosine-3'-phosphate
  modified_base 11: mod_base = OTHER; note = 2'-O-methylguanosine-3'-phosphate
  modified_base 12: mod_base = OTHER; note = 2'-O-methyladenosine-3'-phosphate
  modified_base 13: mod_base = OTHER; note = 2'-O-methylguanosine-3'-phosphate
  modified_base 14: mod_base = OTHER; note = 2'-deoxy-2'-fluoroadenosine-3'-phosphate
  modified_base 15: mod_base = OTHER; note = 2'-O-methyluridine-3'-phosphate
  modified_base 16: mod_base = OTHER; note = 2'-deoxy-2'-fluoroadenosine-3'-phosphate
  modified_base 17: mod_base = OTHER; note = 2'-O-methylcytidine-3'-phosphate
  modified_base 18: mod_base = OTHER; note = 2'-O-methyladenosine-3'-phosphate
  modified_base 19: mod_base = OTHER; note = 2'-O-methylcytidine-3'-phosphate
  modified_base 20: mod_base = OTHER; note = 2'-O-methyluridine-3'-phosphate
  modified_base 21: mod_base = OTHER; note = 2'-O-methyluridine-3'-phosphate
  modified_base 22: mod_base = OTHER; note = 2'-O-methyluridine-3'-phosphate
  modified_base 23: mod_base = OTHER; note = 2'-O-methylcytidine
tgcactctgagagatacactttc

SEQ ID NO: 4632 - RNA, 23 nt, synthetic construct
  source 1..23: mol_type = other RNA
  modified_base 1: mod_base = OTHER; note = 2'-O-methyluridine-3'-phosphate 5'phosphate
  modified_base 2: mod_base = OTHER; note = 2'-deoxy-2'-fluorouridine-3'-phosphate
  modified_base 3: mod_base = OTHER; note = 2'-O-methylguanosine-3'-phosphate
  modified_base 4: mod_base = OTHER; note = 2'-O-methylcytidine-3'-phosphate
  modified_base 5: mod_base = OTHER; note = 2'-O-methyladenosine-3'-phosphate
  modified_base 6: mod_base = OTHER; note = 2'-deoxy-2'-fluorocytidine-3'-phosphate
  modified_base 7: mod_base = OTHER; note = 2'-O-methyluridine-3'-phosphate
  modified_base 8: mod_base = OTHER; note = 2'-O-methylcytidine-3'-phosphate
  modified_base 9: mod_base = OTHER; note = 2'-O-methyluridine-3'-phosphate
  modified_base 10: mod_base = OTHER; note = 2'-O-methylguanosine-3'-phosphate
  modified_base 11: mod_base = OTHER; note = 2'-O-methyladenosine-3'-phosphate
  modified_base 12: mod_base = OTHER; note = 2'-O-methylguanosine-3'-phosphate
  modified_base 13: mod_base = OTHER; note = 2'-O-methyladenosine-3'-phosphate
  modified_base 14: mod_base = OTHER; note = 2'-deoxy-2'-fluoroguanosine-3'-phosphate
  modified_base 15: mod_base = OTHER; note = 2'-O-methyladenosine-3'-phosphate
  modified_base 16: mod_base = OTHER; note = 2'-deoxy-2'-fluorouridine-3'-phosphate
  modified_base 17: mod_base = OTHER; note = 2'-O-methyladenosine-3'-phosphate
  modified_base 18: mod_base = OTHER; note = 2'-O-methylcytidine-3'-phosphate
  modified_base 19: mod_base = OTHER; note = 2'-O-methyladenosine-3'-phosphate
  modified_base 20: mod_base = OTHER; note = 2'-O-methylcytidine-3'-phosphate
  modified_base 21: mod_base = OTHER; note = 2'-O-methyluridine-3'-phosphate
  modified_base 22: mod_base = OTHER; note = 2'-O-methyluridine-3'-phosphate
  modified_base 23: mod_base = OTHER; note = 2'-O-methyluridine
ttgcactctgagagatacacttt

SEQ ID NO: 4633 - RNA, 23 nt, synthetic construct
  source 1..23: mol_type = other RNA
  modified_base 1: mod_base = OTHER; note = 2'-O-methyluridine-3'-phosphate 5'phosphate
  modified_base 2: mod_base = OTHER; note = 2'-deoxy-2'-fluorouridine-3'-phosphate
  modified_base 3: mod_base = OTHER; note = 2'-O-methyluridine-3'-phosphate
  modified_base 4: mod_base = OTHER; note = 2'-O-methylguanosine-3'-phosphate
  modified_base 5: mod_base = OTHER; note = 2'-O-methylcytidine-3'-phosphate
  modified_base 6: mod_base = OTHER; note = 2'-deoxy-2'-fluoroadenosine-3'-phosphate
  modified_base 7: mod_base = OTHER; note = 2'-O-methylcytidine-3'-phosphate
  modified_base 8: mod_base = OTHER; note = 2'-O-methyluridine-3'-phosphate
  modified_base 9: mod_base = OTHER; note = 2'-O-methylcytidine-3'-phosphate
  modified_base 10: mod_base = OTHER; note = 2'-O-methyluridine-3'-phosphate
  modified_base 11: mod_base = OTHER; note = 2'-O-methylguanosine-3'-phosphate
  modified_base 12: mod_base = OTHER; note = 2'-O-methyladenosine-3'-phosphate
  modified_base 13: mod_base = OTHER; note = 2'-O-methylguanosine-3'-phosphate
  modified_base 14: mod_base = OTHER; note = 2'-deoxy-2'-fluoroadenosine-3'-phosphate
  modified_base 15: mod_base = OTHER; note = 2'-O-methylguanosine-3'-phosphate
  modified_base 16: mod_base = OTHER; note = 2'-deoxy-2'-fluoroadenosine-3'-phosphate
  modified_base 17: mod_base = OTHER; note = 2'-O-methyluridine-3'-phosphate
  modified_base 18: mod_base = OTHER; note = 2'-O-methyladenosine-3'-phosphate
  modified_base 19: mod_base = OTHER; note = 2'-O-methylcytidine-3'-phosphate
  modified_base 20: mod_base = OTHER; note = 2'-O-methyladenosine-3'-phosphate
  modified_base 21: mod_base = OTHER; note = 2'-O-methylcytidine-3'-phosphate
  modified_base 22: mod_base = OTHER; note = 2'-O-methyluridine-3'-phosphate
  modified_base 23: mod_base = OTHER; note = 2'-O-methyluridine
tttgcactctgagagatacactt

SEQ ID NO: 4634 - RNA, 23 nt, synthetic construct
  source 1..23: mol_type = other RNA
  modified_base 1: mod_base = OTHER; note = 2'-O-methyluridine-3'-phosphate 5'phosphate
  modified_base 2: mod_base = OTHER; note = 2'-deoxy-2'-fluorocytidine-3'-phosphate
  modified_base 3: mod_base = OTHER; note = 2'-O-methyluridine-3'-phosphate
  modified_base 4: mod_base = OTHER; note = 2'-O-methyluridine-3'-phosphate
  modified_base 5: mod_base = OTHER; note = 2'-O-methylguanosine-3'-phosphate
  modified_base 6: mod_base = OTHER; note = 2'-deoxy-2'-fluorocytidine-3'-phosphate
  modified_base 7: mod_base = OTHER; note = 2'-O-methyladenosine-3'-phosphate
  modified_base 8: mod_base = OTHER; note = 2'-O-methylcytidine-3'-phosphate
  modified_base 9: mod_base = OTHER; note = 2'-O-methyluridine-3'-phosphate
  modified_base 10: mod_base = OTHER; note = 2'-O-methylcytidine-3'-phosphate
  modified_base 11: mod_base = OTHER; note = 2'-O-methyluridine-3'-phosphate
  modified_base 12: mod_base = OTHER; note = 2'-O-methylguanosine-3'-phosphate
  modified_base 13: mod_base = OTHER; note = 2'-O-methyladenosine-3'-phosphate
  modified_base 14: mod_base = OTHER; note = 2'-deoxy-2'-fluoroguanosine-3'-phosphate
  modified_base 15: mod_base = OTHER; note = 2'-O-methyladenosine-3'-phosphate
  modified_base 16: mod_base = OTHER; note = 2'-deoxy-2'-fluoroguanosine-3'-phosphate
  modified_base 17: mod_base = OTHER; note = 2'-O-methyladenosine-3'-phosphate
  modified_base 18: mod_base = OTHER; note = 2'-O-methyluridine-3'-phosphate
  modified_base 19: mod_base = OTHER; note = 2'-O-methyladenosine-3'-phosphate
  modified_base 20: mod_base = OTHER; note = 2'-O-methylcytidine-3'-phosphate
  modified_base 21: mod_base = OTHER; note = 2'-O-methyladenosine-3'-phosphate
  modified_base 22: mod_base = OTHER; note = 2'-O-methylcytidine-3'-phosphate
  modified_base 23: mod_base = OTHER; note = 2'-O-methyluridine
tcttgcactctgagagatacact

SEQ ID NO: 4635 - RNA, 23 nt, synthetic construct
  source 1..23: mol_type = other RNA
  modified_base 1: mod_base = OTHER; note = 2'-O-methyluridine-3'-phosphate 5'phosphate
  modified_base 2: mod_base = OTHER; note = 2'-deoxy-2'-fluorouridine-3'-phosphate
  modified_base 3: mod_base = OTHER; note = 2'-O-methylcytidine-3'-phosphate
  modified_base 4: mod_base = OTHER; note = 2'-O-methyluridine-3'-phosphate
  modified_base 5: mod_base = OTHER; note = 2'-O-methyluridine-3'-phosphate
  modified_base 6: mod_base = OTHER; note = 2'-deoxy-2'-fluoroguanosine-3'-phosphate
  modified_base 7: mod_base = OTHER; note = 2'-O-methylcytidine-3'-phosphate
  modified_base 8: mod_base = OTHER; note = 2'-O-methyladenosine-3'-phosphate
  modified_base 9: mod_base = OTHER; note = 2'-O-methylcytidine-3'-phosphate
  modified_base 10: mod_base = OTHER; note = 2'-O-methyluridine-3'-phosphate
  modified_base 11: mod_base = OTHER; note = 2'-O-methylcytidine-3'-phosphate
  modified_base 12: mod_base = OTHER; note = 2'-O-methyluridine-3'-phosphate
  modified_base 13: mod_base = OTHER; note = 2'-O-methylguanosine-3'-phosphate
  modified_base 14: mod_base = OTHER; note = 2'-deoxy-2'-fluoroadenosine-3'-phosphate
  modified_base 15: mod_base = OTHER; note = 2'-O-methylguanosine-3'-phosphate
  modified_base 16: mod_base = OTHER; note = 2'-deoxy-2'-fluoroadenosine-3'-phosphate
  modified_base 17: mod_base = OTHER; note = 2'-O-methylguanosine-3'-phosphate
  modified_base 18: mod_base = OTHER; note = 2'-O-methyladenosine-3'-phosphate
  modified_base 19: mod_base = OTHER; note = 2'-O-methyluridine-3'-phosphate
  modified_base 20: mod_base = OTHER; note = 2'-O-methyladenosine-3'-phosphate
  modified_base 21: mod_base = OTHER; note = 2'-O-methylcytidine-3'-phosphate
  modified_base 22: mod_base = OTHER; note = 2'-O-methyladenosine-3'-phosphate
  modified_base 23: mod_base = OTHER; note = 2'-O-methylcytidine
ttcttgcactctgagagatacac

SEQ ID NO: 4636 - RNA, 23 nt, synthetic construct
  source 1..23: mol_type = other RNA
  modified_base 1: mod_base = OTHER; note = 2'-O-methyluridine-3'-phosphate 5'phosphate
  modified_base 2: mod_base = OTHER; note = 2'-deoxy-2'-fluoroadenosine-3'-phosphate
  modified_base 3: mod_base = OTHER; note = 2'-O-methylguanosine-3'-phosphate
  modified_base 4: mod_base = OTHER; note = 2'-O-methyluridine-3'-phosphate
  modified_base 5: mod_base = OTHER; note = 2'-O-methylcytidine-3'-phosphate
  modified_base 6: mod_base = OTHER; note = 2'-deoxy-2'-fluorouridine-3'-phosphate
  modified_base 7: mod_base = OTHER; note = 2'-O-methyluridine-3'-phosphate
  modified_base 8: mod_base = OTHER; note = 2'-O-methylguanosine-3'-phosphate
  modified_base 9: mod_base = OTHER; note = 2'-O-methylcytidine-3'-phosphate
  modified_base 10: mod_base = OTHER; note = 2'-O-methyladenosine-3'-phosphate
  modified_base 11: mod_base = OTHER; note = 2'-O-methylcytidine-3'-phosphate
  modified_base 12: mod_base = OTHER; note = 2'-O-methyluridine-3'-phosphate
  modified_base 13: mod_base = OTHER; note = 2'-O-methylcytidine-3'-phosphate
  modified_base 14: mod_base = OTHER; note = 2'-deoxy-2'-fluorouridine-3'-phosphate
  modified_base 15: mod_base = OTHER; note = 2'-O-methylguanosine-3'-phosphate
  modified_base 16: mod_base = OTHER; note = 2'-deoxy-2'-fluoroadenosine-3'-phosphate
  modified_base 17: mod_base = OTHER; note = 2'-O-methylguanosine-3'-phosphate
  modified_base 18: mod_base = OTHER; note = 2'-O-methyladenosine-3'-phosphate
  modified_base 19: mod_base = OTHER; note = 2'-O-methylguanosine-3'-phosphate
  modified_base 20: mod_base = OTHER; note = 2'-O-methyladenosine-3'-phosphate
  modified_base 21: mod_base = OTHER; note = 2'-O-methyluridine-3'-phosphate
  modified_base 22: mod_base = OTHER; note = 2'-O-methyladenosine-3'-phosphate
  modified_base 23: mod_base = OTHER; note = 2'-O-methylcytidine
tagtcttgcactctgagagatac

SEQ ID NO: 4637 - RNA, 23 nt, synthetic construct
  source 1..23: mol_type = other RNA
  modified_base 1: mod_base = OTHER; note = 2'-O-methyluridine-3'-phosphate 5'phosphate
  modified_base 2: mod_base = OTHER; note = 2'-deoxy-2'-fluorouridine-3'-phosphate
  modified_base 3: mod_base = OTHER; note = 2'-O-methyluridine-3'-phosphate
  modified_base 4: mod_base = OTHER; note = 2'-O-methyluridine-3'-phosphate
  modified_base 5: mod_base = OTHER; note = 2'-O-methylguanosine-3'-phosphate
  modified_base 6: mod_base = OTHER; note = 2'-deoxy-2'-fluoroguanosine-3'-phosphate
  modified_base 7: mod_base = OTHER; note = 2'-O-methyladenosine-3'-phosphate
  modified_base 8: mod_base = OTHER; note = 2'-O-methylcytidine-3'-phosphate
  modified_base 9: mod_base = OTHER; note = 2'-O-methyladenosine-3'-phosphate
  modified_base 10: mod_base = OTHER; note = 2'-O-methyluridine-3'-phosphate
  modified_base 11: mod_base = OTHER; note = 2'-O-methylcytidine-3'-phosphate
  modified_base 12: mod_base = OTHER; note = 2'-O-methylguanosine-3'-phosphate
  modified_base 13: mod_base = OTHER; note = 2'-O-methyluridine-3'-phosphate
  modified_base 14: mod_base = OTHER; note = 2'-deoxy-2'-fluorocytidine-3'-phosphate
  modified_base 15: mod_base = OTHER; note = 2'-O-methylcytidine-3'-phosphate
  modified_base 16: mod_base = OTHER; note = 2'-deoxy-2'-fluorocytidine-3'-phosphate
  modified_base 17: mod_base = OTHER; note = 2'-O-methyluridine-3'-phosphate
  modified_base 18: mod_base = OTHER; note = 2'-O-methylcytidine-3'-phosphate
  modified_base 19: mod_base = OTHER; note = 2'-O-methyluridine-3'-phosphate
  modified_base 20: mod_base = OTHER; note = 2'-O-methylguanosine-3'-phosphate
  modified_base 21: mod_base = OTHER; note = 2'-O-methyluridine-3'-phosphate
  modified_base 22: mod_base = OTHER; note = 2'-O-methyladenosine-3'-phosphate
  modified_base 23: mod_base = OTHER; note = 2'-O-methylguanosine
ttttggacatcgtccctctgtag

SEQ ID NO: 4638 - RNA, 23 nt, synthetic construct
  source 1..23: mol_type = other RNA
  modified_base 1: mod_base = OTHER; note = 2'-O-methyluridine-3'-phosphate 5'phosphate
  modified_base 2: mod_base = OTHER; note = 2'-deoxy-2'-fluorouridine-3'-phosphate
  modified_base 3: mod_base = OTHER; note = 2'-O-methyluridine-3'-phosphate
  modified_base 4: mod_base = OTHER; note = 2'-O-methyluridine-3'-phosphate
  modified_base 5: mod_base = OTHER; note = 2'-O-methyluridine-3'-phosphate
  modified_base 6: mod_base = OTHER; note = 2'-deoxy-2'-fluoroguanosine-3'-phosphate
  modified_base 7: mod_base = OTHER; note = 2'-O-methylguanosine-3'-phosphate
  modified_base 8: mod_base = OTHER; note = 2'-O-methyladenosine-3'-phosphate
  modified_base 9: mod_base = OTHER; note = 2'-O-methylcytidine-3'-phosphate
  modified_base 10: mod_base = OTHER; note = 2'-O-methyladenosine-3'-phosphate
  modified_base 11: mod_base = OTHER; note = 2'-O-methyluridine-3'-phosphate
  modified_base 12: mod_base = OTHER; note = 2'-O-methylcytidine-3'-phosphate
  modified_base 13: mod_base = OTHER; note = 2'-O-methylguanosine-3'-phosphate
  modified_base 14: mod_base = OTHER; note = 2'-deoxy-2'-fluorouridine-3'-phosphate
  modified_base 15: mod_base = OTHER; note = 2'-O-methylcytidine-3'-phosphate
  modified_base 16: mod_base = OTHER; note = 2'-deoxy-2'-fluorocytidine-3'-phosphate
  modified_base 17: mod_base = OTHER; note = 2'-O-methylcytidine-3'-phosphate
  modified_base 18: mod_base = OTHER; note = 2'-O-methyluridine-3'-phosphate
  modified_base 19: mod_base = OTHER; note = 2'-O-methylcytidine-3'-phosphate
  modified_base 20: mod_base = OTHER; note = 2'-O-methyluridine-3'-phosphate
  modified_base 21: mod_base = OTHER; note = 2'-O-methylguanosine-3'-phosphate
  modified_base 22: mod_base = OTHER; note = 2'-O-methyluridine-3'-phosphate
  modified_base 23: mod_base = OTHER; note = 2'-O-methyladenosine
tttttggacatcgtccctctgta

SEQ ID NO: 4639 - RNA, 23 nt, synthetic construct
  source 1..23: mol_type = other RNA
  modified_base 1: mod_base = OTHER; note = 2'-O-methyluridine-3'-phosphate 5'phosphate
  modified_base 2: mod_base = OTHER; note = 2'-deoxy-2'-fluoroguanosine-3'-phosphate
  modified_base 3: mod_base = OTHER; note = 2'-O-methyluridine-3'-phosphate
  modified_base 4: mod_base = OTHER; note = 2'-O-methyluridine-3'-phosphate
  modified_base 5: mod_base = OTHER; note = 2'-O-methyluridine-3'-phosphate
  modified_base 6: mod_base = OTHER; note = 2'-deoxy-2'-fluorouridine-3'-phosphate
  modified_base 7: mod_base = OTHER; note = 2'-O-methylguanosine-3'-phosphate
  modified_base 8: mod_base = OTHER; note = 2'-O-methylguanosine-3'-phosphate
  modified_base 9: mod_base = OTHER; note = 2'-O-methyladenosine-3'-phosphate
  modified_base 10: mod_base = OTHER; note = 2'-O-methylcytidine-3'-phosphate
  modified_base 11: mod_base = OTHER; note = 2'-O-methyladenosine-3'-phosphate
  modified_base 12: mod_base = OTHER; note = 2'-O-methyluridine-3'-phosphate
  modified_base 13: mod_base = OTHER; note = 2'-O-methylcytidine-3'-phosphate
  modified_base 14: mod_base = OTHER; note = 2'-deoxy-2'-fluoroguanosine-3'-phosphate
  modified_base 15: mod_base = OTHER; note = 2'-O-methyluridine-3'-phosphate
  modified_base 16: mod_base = OTHER; note = 2'-deoxy-2'-fluorocytidine-3'-phosphate
  modified_base 17: mod_base = OTHER; note = 2'-O-methylcytidine-3'-phosphate
  modified_base 18: mod_base = OTHER; note = 2'-O-methylcytidine-3'-phosphate
  modified_base 19: mod_base = OTHER; note = 2'-O-methyluridine-3'-phosphate
  modified_base 20: mod_base = OTHER; note = 2'-O-methylcytidine-3'-phosphate
  modified_base 21: mod_base = OTHER; note = 2'-O-methyluridine-3'-phosphate
  modified_base 22: mod_base = OTHER; note = 2'-O-methylguanosine-3'-phosphate
  modified_base 23: mod_base = OTHER; note = 2'-O-methyluridine
tgttttggacatcgtccctctgt

SEQ ID NO: 4640 - RNA, 23 nt, synthetic construct
  source 1..23: mol_type = other RNA
  modified_base 1: mod_base = OTHER; note = 2'-O-methyluridine-3'-phosphate 5'phosphate
  modified_base 2: mod_base = OTHER; note = 2'-deoxy-2'-fluorouridine-3'-phosphate
  modified_base 3: mod_base = OTHER; note = 2'-O-methylguanosine-3'-phosphate
  modified_base 4: mod_base = OTHER; note = 2'-O-methyluridine-3'-phosphate
  modified_base 5: mod_base = OTHER; note = 2'-O-methyluridine-3'-phosphate
  modified_base 6: mod_base = OTHER; note = 2'-deoxy-2'-fluorouridine-3'-phosphate
  modified_base 7: mod_base = OTHER; note = 2'-O-methyluridine-3'-phosphate
  modified_base 8: mod_base = OTHER; note = 2'-O-methylguanosine-3'-phosphate
  modified_base 9: mod_base = OTHER; note = 2'-O-methylguanosine-3'-phosphate
  modified_base 10: mod_base = OTHER; note = 2'-O-methyladenosine-3'-phosphate
  modified_base 11: mod_base = OTHER; note = 2'-O-methylcytidine-3'-phosphate
  modified_base 12: mod_base = OTHER; note = 2'-O-methyladenosine-3'-phosphate
  modified_base 13: mod_base = OTHER; note = 2'-O-methyluridine-3'-phosphate
  modified_base 14: mod_base = OTHER; note = 2'-deoxy-2'-fluorocytidine-3'-phosphate
  modified_base 15: mod_base = OTHER; note = 2'-O-methylguanosine-3'-phosphate
  modified_base 16: mod_base = OTHER; note = 2'-deoxy-2'-fluorouridine-3'-phosphate
  modified_base 17: mod_base = OTHER; note = 2'-O-methylcytidine-3'-phosphate
  modified_base 18: mod_base = OTHER; note = 2'-O-methylcytidine-3'-phosphate
  modified_base 19: mod_base = OTHER; note = 2'-O-methylcytidine-3'-phosphate
  modified_base 20: mod_base = OTHER; note = 2'-O-methyluridine-3'-phosphate
  modified_base 21: mod_base = OTHER; note = 2'-O-methylcytidine-3'-phosphate
  modified_base 22: mod_base = OTHER; note = 2'-O-methyluridine-3'-phosphate
  modified_base 23: mod_base = OTHER; note = 2'-O-methylguanosine
ttgttttggacatcgtccctctg

SEQ ID NO: 4641 - RNA, 23 nt, synthetic construct
  source 1..23: mol_type = other RNA
  modified_base 1: mod_base = OTHER; note = 2'-O-methyluridine-3'-phosphate 5'phosphate
  modified_base 2: mod_base = OTHER; note = 2'-deoxy-2'-fluorouridine-3'-phosphate
  modified_base 3: mod_base = OTHER; note = 2'-O-methyluridine-3'-phosphate
  modified_base 4: mod_base = OTHER; note = 2'-O-methylguanosine-3'-phosphate
  modified_base 5: mod_base = OTHER; note = 2'-O-methyluridine-3'-phosphate
  modified_base 6: mod_base = OTHER; note = 2'-deoxy-2'-fluorouridine-3'-phosphate
  modified_base 7: mod_base = OTHER; note = 2'-O-methyluridine-3'-phosphate
  modified_base 8: mod_base = OTHER; note = 2'-O-methyluridine-3'-phosphate
  modified_base 9: mod_base = OTHER; note = 2'-O-methylguanosine-3'-phosphate
  modified_base 10: mod_base = OTHER; note = 2'-O-methylguanosine-3'-phosphate
  modified_base 11: mod_base = OTHER; note = 2'-O-methyladenosine-3'-phosphate
  modified_base 12: mod_base = OTHER; note = 2'-O-methylcytidine-3'-phosphate
  modified_base 13: mod_base = OTHER; note = 2'-O-methyladenosine-3'-phosphate
  modified_base 14: mod_base = OTHER; note = 2'-deoxy-2'-fluorouridine-3'-phosphate
  modified_base 15: mod_base = OTHER; note = 2'-O-methylcytidine-3'-phosphate
  modified_base 16: mod_base = OTHER; note = 2'-deoxy-2'-fluoroguanosine-3'-phosphate
  modified_base 17: mod_base = OTHER; note = 2'-O-methyluridine-3'-phosphate
  modified_base 18: mod_base = OTHER; note = 2'-O-methylcytidine-3'-phosphate
  modified_base 19: mod_base = OTHER; note = 2'-O-methylcytidine-3'-phosphate
  modified_base 20: mod_base = OTHER; note = 2'-O-methylcytidine-3'-phosphate
  modified_base 21: mod_base = OTHER; note = 2'-O-methyluridine-3'-phosphate
  modified_base 22: mod_base = OTHER; note = 2'-O-methylcytidine-3'-phosphate
  modified_base 23: mod_base = OTHER; note = 2'-O-methyluridine
tttgttttggacatcgtccctct

SEQ ID NO: 4642 - RNA, 23 nt, synthetic construct
  source 1..23: mol_type = other RNA
  modified_base 1: mod_base = OTHER; note = 2'-O-methyluridine-3'-phosphate 5'phosphate
  modified_base 2: mod_base = OTHER; note = 2'-deoxy-2'-fluorouridine-3'-phosphate
  modified_base 3: mod_base = OTHER; note = 2'-O-methyluridine-3'-phosphate
  modified_base 4: mod_base = OTHER; note = 2'-O-methyluridine-3'-phosphate
  modified_base 5: mod_base = OTHER; note = 2'-O-methylguanosine-3'-phosphate
  modified_base 6: mod_base = OTHER; note = 2'-deoxy-2'-fluorouridine-3'-phosphate
  modified_base 7: mod_base = OTHER; note = 2'-O-methyluridine-3'-phosphate
  modified_base 8: mod_base = OTHER; note = 2'-O-methyluridine-3'-phosphate
  modified_base 9: mod_base = OTHER; note = 2'-O-methyluridine-3'-phosphate
  modified_base 10: mod_base = OTHER; note = 2'-O-methylguanosine-3'-phosphate
  modified_base 11: mod_base = OTHER; note = 2'-O-methylguanosine-3'-phosphate
  modified_base 12: mod_base = OTHER; note = 2'-O-methyladenosine-3'-phosphate
  modified_base 13: mod_base = OTHER; note = 2'-O-methylcytidine-3'-phosphate
  modified_base 14: mod_base = OTHER; note = 2'-deoxy-2'-fluoroadenosine-3'-phosphate
  modified_base 15: mod_base = OTHER; note = 2'-O-methyluridine-3'-phosphate
  modified_base 16: mod_base = OTHER; note = 2'-deoxy-2'-fluorocytidine-3'-phosphate
  modified_base 17: mod_base = OTHER; note = 2'-O-methylguanosine-3'-phosphate
  modified_base 18: mod_base = OTHER; note = 2'-O-methyluridine-3'-phosphate
  modified_base 19: mod_base = OTHER; note = 2'-O-methylcytidine-3'-phosphate
  modified_base 20: mod_base = OTHER; note = 2'-O-methylcytidine-3'-phosphate
  modified_base 21: mod_base = OTHER; note = 2'-O-methylcytidine-3'-phosphate
  modified_base 22: mod_base = OTHER; note = 2'-O-methyluridine-3'-phosphate
  modified_base 23: mod_base = OTHER; note = 2'-O-methylcytidine
ttttgttttggacatcgtccctc

SEQ ID NO: 4643 - RNA, 23 nt, synthetic construct
  source 1..23: mol_type = other RNA
  modified_base 1: mod_base = OTHER; note = 2'-O-methyluridine-3'-phosphate 5'phosphate
  modified_base 2: mod_base = OTHER; note = 2'-deoxy-2'-fluorouridine-3'-phosphate
  modified_base 3: mod_base = OTHER; note = 2'-O-methyluridine-3'-phosphate
  modified_base 4: mod_base = OTHER; note = 2'-O-methyluridine-3'-phosphate
  modified_base 5: mod_base = OTHER; note = 2'-O-methyluridine-3'-phosphate
  modified_base 6: mod_base = OTHER; note = 2'-deoxy-2'-fluoroguanosine-3'-phosphate
  modified_base 7: mod_base = OTHER; note = 2'-O-methyluridine-3'-phosphate
  modified_base 8: mod_base = OTHER; note = 2'-O-methyluridine-3'-phosphate
  modified_base 9: mod_base = OTHER; note = 2'-O-methyluridine-3'-phosphate
  modified_base 10: mod_base = OTHER; note = 2'-O-methyluridine-3'-phosphate
  modified_base 11: mod_base = OTHER; note = 2'-O-methylguanosine-3'-phosphate
  modified_base 12: mod_base = OTHER; note = 2'-O-methylguanosine-3'-phosphate
  modified_base 13: mod_base = OTHER; note = 2'-O-methyladenosine-3'-phosphate
  modified_base 14: mod_base = OTHER; note = 2'-deoxy-2'-fluorocytidine-3'-phosphate
  modified_base 15: mod_base = OTHER; note = 2'-O-methyladenosine-3'-phosphate
  modified_base 16: mod_base = OTHER; note = 2'-deoxy-2'-fluorouridine-3'-phosphate
  modified_base 17: mod_base = OTHER; note = 2'-O-methylcytidine-3'-phosphate
  modified_base 18: mod_base = OTHER; note = 2'-O-methylguanosine-3'-phosphate
  modified_base 19: mod_base = OTHER; note = 2'-O-methyluridine-3'-phosphate
  modified_base 20: mod_base = OTHER; note = 2'-O-methylcytidine-3'-phosphate
  modified_base 21: mod_base = OTHER; note = 2'-O-methylcytidine-3'-phosphate
  modified_base 22: mod_base = OTHER; note = 2'-O-methylcytidine-3'-phosphate
  modified_base 23: mod_base = OTHER; note = 2'-O-methyluridine
tttttgttttggacatcgtccct

SEQ ID NO: 4644 - RNA, 23 nt, synthetic construct
  source 1..23: mol_type = other RNA
  modified_base 1: mod_base = OTHER; note = 2'-O-methyluridine-3'-phosphate 5'phosphate
  modified_base 2: mod_base = OTHER; note = 2'-deoxy-2'-fluorouridine-3'-phosphate
  modified_base 3: mod_base = OTHER; note = 2'-O-methyluridine-3'-phosphate
  modified_base 4: mod_base = OTHER; note = 2'-O-methyluridine-3'-phosphate
  modified_base 5: mod_base = OTHER; note = 2'-O-methyluridine-3'-phosphate
  modified_base 6: mod_base = OTHER; note = 2'-deoxy-2'-fluorouridine-3'-phosphate
  modified_base 7: mod_base = OTHER; note = 2'-O-methylguanosine-3'-phosphate
  modified_base 8: mod_base = OTHER; note = 2'-O-methyluridine-3'-phosphate
  modified_base 9: mod_base = OTHER; note = 2'-O-methyluridine-3'-phosphate
  modified_base 10: mod_base = OTHER; note = 2'-O-methyluridine-3'-phosphate
  modified_base 11: mod_base = OTHER; note = 2'-O-methyluridine-3'-phosphate
  modified_base 12: mod_base = OTHER; note = 2'-O-methylguanosine-3'-phosphate
  modified_base 13: mod_base = OTHER; note = 2'-O-methylguanosine-3'-phosphate
  modified_base 14: mod_base = OTHER; note = 2'-deoxy-2'-fluoroadenosine-3'-phosphate
  modified_base 15: mod_base = OTHER; note = 2'-O-methylcytidine-3'-phosphate
  modified_base 16: mod_base = OTHER; note = 2'-deoxy-2'-fluoroadenosine-3'-phosphate
  modified_base 17: mod_base = OTHER; note = 2'-O-methyluridine-3'-phosphate
  modified_base 18: mod_base = OTHER; note = 2'-O-methylcytidine-3'-phosphate
  modified_base 19: mod_base = OTHER; note = 2'-O-methylguanosine-3'-phosphate
  modified_base 20: mod_base = OTHER; note = 2'-O-methyluridine-3'-phosphate
  modified_base 21: mod_base = OTHER; note = 2'-O-methylcytidine-3'-phosphate
  modified_base 22: mod_base = OTHER; note = 2'-O-methylcytidine-3'-phosphate
  modified_base 23: mod_base = OTHER; note = 2'-O-methylcytidine
ttttttgttttggacatcgtccc

SEQ ID NO: 4645 - RNA, 23 nt, synthetic construct
  source 1..23: mol_type = other RNA
  modified_base 1: mod_base = OTHER; note = 2'-O-methyluridine-3'-phosphate 5'phosphate
  modified_base 2: mod_base = OTHER; note = 2'-deoxy-2'-fluorouridine-3'-phosphate
  modified_base 3: mod_base = OTHER; note = 2'-O-methyluridine-3'-phosphate
  modified_base 4: mod_base = OTHER; note = 2'-O-methyluridine-3'-phosphate
  modified_base 5: mod_base = OTHER; note = 2'-O-methyluridine-3'-phosphate
  modified_base 6: mod_base = OTHER; note = 2'-deoxy-2'-fluorouridine-3'-phosphate
  modified_base 7: mod_base = OTHER; note = 2'-O-methyluridine-3'-phosphate
  modified_base 8: mod_base = OTHER; note = 2'-O-methylguanosine-3'-phosphate
  modified_base 9: mod_base = OTHER; note = 2'-O-methyluridine-3'-phosphate
  modified_base 10: mod_base = OTHER; note = 2'-O-methyluridine-3'-phosphate
  modified_base 11: mod_base = OTHER; note = 2'-O-methyluridine-3'-phosphate
  modified_base 12: mod_base = OTHER; note = 2'-O-methyluridine-3'-phosphate
  modified_base 13: mod_base = OTHER; note = 2'-O-methylguanosine-3'-phosphate
  modified_base 14: mod_base = OTHER; note = 2'-deoxy-2'-fluoroguanosine-3'-phosphate
  modified_base 15: mod_base = OTHER; note = 2'-O-methyladenosine-3'-phosphate
  modified_base 16: mod_base = OTHER; note = 2'-deoxy-2'-fluorocytidine-3'-phosphate
  modified_base 17: mod_base = OTHER; note = 2'-O-methyladenosine-3'-phosphate
  modified_base 18: mod_base = OTHER; note = 2'-O-methyluridine-3'-phosphate
  modified_base 19: mod_base = OTHER; note = 2'-O-methylcytidine-3'-phosphate
  modified_base 20: mod_base = OTHER; note = 2'-O-methylguanosine-3'-phosphate
  modified_base 21: mod_base = OTHER; note = 2'-O-methyluridine-3'-phosphate
  modified_base 22: mod_base = OTHER; note = 2'-O-methylcytidine-3'-phosphate
  modified_base 23: mod_base = OTHER; note = 2'-O-methylcytidine
tttttttgttttggacatcgtcc

SEQ ID NO: 4646 - RNA, 23 nt, synthetic construct
  source 1..23: mol_type = other RNA
  modified_base 1: mod_base = OTHER; note = 2'-O-methyluridine-3'-phosphate 5'phosphate
  modified_base 2: mod_base = OTHER; note = 2'-deoxy-2'-fluoroadenosine-3'-phosphate
  modified_base 3: mod_base = OTHER; note = 2'-O-methyluridine-3'-phosphate
  modified_base 4: mod_base = OTHER; note = 2'-O-methyluridine-3'-phosphate
  modified_base 5: mod_base = OTHER; note = 2'-O-methyluridine-3'-phosphate
  modified_base 6: mod_base = OTHER; note = 2'-deoxy-2'-fluorouridine-3'-phosphate
  modified_base 7: mod_base = OTHER; note = 2'-O-methyluridine-3'-phosphate
  modified_base 8: mod_base = OTHER; note = 2'-O-methyluridine-3'-phosphate
  modified_base 9: mod_base = OTHER; note = 2'-O-methylguanosine-3'-phosphate
  modified_base 10: mod_base = OTHER; note = 2'-O-methyluridine-3'-phosphate
  modified_base 11: mod_base = OTHER; note = 2'-O-methyluridine-3'-phosphate
  modified_base 12: mod_base = OTHER; note = 2'-O-methyluridine-3'-phosphate
  modified_base 13: mod_base = OTHER; note = 2'-O-methyluridine-3'-phosphate
  modified_base 14: mod_base = OTHER; note = 2'-deoxy-2'-fluoroguanosine-3'-phosphate
  modified_base 15: mod_base = OTHER; note = 2'-O-methylguanosine-3'-phosphate
  modified_base 16: mod_base = OTHER; note = 2'-deoxy-2'-fluoroadenosine-3'-phosphate
  modified_base 17: mod_base = OTHER; note = 2'-O-methylcytidine-3'-phosphate
  modified_base 18: mod_base = OTHER; note = 2'-O-methyladenosine-3'-phosphate
  modified_base 19: mod_base = OTHER; note = 2'-O-methyluridine-3'-phosphate
  modified_base 20: mod_base = OTHER; note = 2'-O-methylcytidine-3'-phosphate
  modified_base 21: mod_base = OTHER; note = 2'-O-methylguanosine-3'-phosphate
  modified_base 22: mod_base = OTHER; note = 2'-O-methyluridine-3'-phosphate
  modified_base 23: mod_base = OTHER; note = 2'-O-methylcytidine
tattttttgttttggacatcgtc

SEQ ID NO: 4647 - RNA, 23 nt, synthetic construct
  source 1..23: mol_type = other RNA
  modified_base 1: mod_base = OTHER; note = 2'-O-methyluridine-3'-phosphate 5'phosphate
  modified_base 2: mod_base = OTHER; note = 2'-deoxy-2'-fluorocytidine-3'-phosphate
  modified_base 3: mod_base = OTHER; note = 2'-O-methyladenosine-3'-phosphate
  modified_base 4: mod_base = OTHER; note = 2'-O-methyluridine-3'-phosphate
  modified_base 5: mod_base = OTHER; note = 2'-O-methyluridine-3'-phosphate
  modified_base 6: mod_base = OTHER; note = 2'-deoxy-2'-fluorouridine-3'-phosphate
  modified_base 7: mod_base = OTHER; note = 2'-O-methyluridine-3'-phosphate
  modified_base 8: mod_base = OTHER; note = 2'-O-methyluridine-3'-phosphate
  modified_base 9: mod_base = OTHER; note = 2'-O-methyluridine-3'-phosphate
  modified_base 10: mod_base = OTHER; note = 2'-O-methylguanosine-3'-phosphate
  modified_base 11: mod_base = OTHER; note = 2'-O-methyluridine-3'-phosphate
  modified_base 12: mod_base = OTHER; note = 2'-O-methyluridine-3'-phosphate
  modified_base 13: mod_base = OTHER; note = 2'-O-methyluridine-3'-phosphate
  modified_base 14: mod_base = OTHER; note = 2'-deoxy-2'-fluorouridine-3'-phosphate
  modified_base 15: mod_base = OTHER; note = 2'-O-methylguanosine-3'-phosphate
  modified_base 16: mod_base = OTHER; note = 2'-deoxy-2'-fluoroguanosine-3'-phosphate
  modified_base 17: mod_base = OTHER; note = 2'-O-methyladenosine-3'-phosphate
  modified_base 18: mod_base = OTHER; note = 2'-O-methylcytidine-3'-phosphate
  modified_base 19: mod_base = OTHER; note = 2'-O-methyladenosine-3'-phosphate
  modified_base 20: mod_base = OTHER; note = 2'-O-methyluridine-3'-phosphate
  modified_base 21: mod_base = OTHER; note = 2'-O-methylcytidine-3'-phosphate
  modified_base 22: mod_base = OTHER; note = 2'-O-methylguanosine-3'-phosphate
  modified_base 23: mod_base = OTHER; note = 2'-O-methyluridine
tcattttttgttttggacatcgt

SEQ ID NO: 4648 - RNA, 23 nt, synthetic construct
  source 1..23: mol_type = other RNA
  modified_base 1: mod_base = OTHER; note = 2'-O-methyluridine-3'-phosphate 5'phosphate
  modified_base 2: mod_base = OTHER; note = 2'-deoxy-2'-fluorocytidine-3'-phosphate
  modified_base 3: mod_base = OTHER; note = 2'-O-methylcytidine-3'-phosphate
  modified_base 4: mod_base = OTHER; note = 2'-O-methyladenosine-3'-phosphate
  modified_base 5: mod_base = OTHER; note = 2'-O-methyluridine-3'-phosphate
  modified_base 6: mod_base = OTHER; note = 2'-deoxy-2'-fluorouridine-3'-phosphate
  modified_base 7: mod_base = OTHER; note = 2'-O-methyluridine-3'-phosphate
  modified_base 8: mod_base = OTHER; note = 2'-O-methyluridine-3'-phosphate
  modified_base 9: mod_base = OTHER; note = 2'-O-methyluridine-3'-phosphate
  modified_base 10: mod_base = OTHER; note = 2'-O-methyluridine-3'-phosphate
  modified_base 11: mod_base = OTHER; note = 2'-O-methylguanosine-3'-phosphate
  modified_base 12: mod_base = OTHER; note = 2'-O-methyluridine-3'-phosphate
  modified_base 13: mod_base = OTHER; note = 2'-O-methyluridine-3'-phosphate
  modified_base 14: mod_base = OTHER; note = 2'-deoxy-2'-fluorouridine-3'-phosphate
  modified_base 15: mod_base = OTHER; note = 2'-O-methyluridine-3'-phosphate
  modified_base 16: mod_base = OTHER; note = 2'-deoxy-2'-fluoroguanosine-3'-phosphate
  modified_base 17: mod_base = OTHER; note = 2'-O-methylguanosine-3'-phosphate
  modified_base 18: mod_base = OTHER; note = 2'-O-methyladenosine-3'-phosphate
  modified_base 19: mod_base = OTHER; note = 2'-O-methylcytidine-3'-phosphate
  modified_base 20: mod_base = OTHER; note = 2'-O-methyladenosine-3'-phosphate
  modified_base 21: mod_base = OTHER; note = 2'-O-methyluridine-3'-phosphate
  modified_base 22: mod_base = OTHER; note = 2'-O-methylcytidine-3'-phosphate
  modified_base 23: mod_base = OTHER; note = 2'-O-methylguanosine
tccattttttgttttggacatcg

SEQ ID NO: 4649 - RNA, 23 nt, synthetic construct
  source 1..23: mol_type = other RNA
  modified_base 1: mod_base = OTHER; note = 2'-O-methyluridine-3'-phosphate 5'phosphate
  modified_base 2: mod_base = OTHER; note = 2'-deoxy-2'-fluoroguanosine-3'-phosphate
  modified_base 3: mod_base = OTHER; note = 2'-O-methylguanosine-3'-phosphate
  modified_base 4: mod_base = OTHER; note = 2'-O-methyluridine-3'-phosphate
  modified_base 5: mod_base = OTHER; note = 2'-O-methylguanosine-3'-phosphate
  modified_base 6: mod_base = OTHER; note = 2'-deoxy-2'-fluoroadenosine-3'-phosphate
  modified_base 7: mod_base = OTHER; note = 2'-O-methylguanosine-3'-phosphate
  modified_base 8: mod_base = OTHER; note = 2'-O-methyladenosine-3'-phosphate
  modified_base 9: mod_base = OTHER; note = 2'-O-methyladenosine-3'-phosphate
  modified_base 10: mod_base = OTHER; note = 2'-O-methyluridine-3'-phosphate
  modified_base 11: mod_base = OTHER; note = 2'-O-methylcytidine-3'-phosphate
  modified_base 12: mod_base = OTHER; note = 2'-O-methyluridine-3'-phosphate
  modified_base 13: mod_base = OTHER; note = 2'-O-methyladenosine-3'-phosphate
  modified_base 14: mod_base = OTHER; note = 2'-deoxy-2'-fluoroguanosine-3'-phosphate
  modified_base 15: mod_base = OTHER; note = 2'-O-methylguanosine-3'-phosphate
  modified_base 16: mod_base = OTHER; note = 2'-deoxy-2'-fluorouridine-3'-phosphate
  modified_base 17: mod_base = OTHER; note = 2'-O-methylcytidine-3'-phosphate
  modified_base 18: mod_base = OTHER; note = 2'-O-methyluridine-3'-phosphate
  modified_base 19: mod_base = OTHER; note = 2'-O-methylguanosine-3'-phosphate
  modified_base 20: mod_base = OTHER; note = 2'-O-methyluridine-3'-phosphate
  modified_base 21: mod_base = OTHER; note = 2'-O-methylguanosine-3'-phosphate
  modified_base 22: mod_base = OTHER; note = 2'-O-methylguanosine-3'-phosphate
  modified_base 23: mod_base = OTHER; note = 2'-O-methylguanosine
tggtgagaatctaggtctgtggg

SEQ ID NO: 4650 - RNA, 23 nt, synthetic construct
  source 1..23: mol_type = other RNA
  modified_base 1: mod_base = OTHER; note = 2'-O-methyluridine-3'-phosphate 5'phosphate
  modified_base 2: mod_base = OTHER; note = 2'-deoxy-2'-fluoroadenosine-3'-phosphate
  modified_base 3: mod_base = OTHER; note = 2'-O-methylguanosine-3'-phosphate
  modified_base 4: mod_base = OTHER; note = 2'-O-methylguanosine-3'-phosphate
  modified_base 5: mod_base = OTHER; note = 2'-O-methyluridine-3'-phosphate
  modified_base 6: mod_base = OTHER; note = 2'-deoxy-2'-fluoroguanosine-3'-phosphate
  modified_base 7: mod_base = OTHER; note = 2'-O-methyladenosine-3'-phosphate
  modified_base 8: mod_base = OTHER; note = 2'-O-methylguanosine-3'-phosphate
  modified_base 9: mod_base = OTHER; note = 2'-O-methyladenosine-3'-phosphate
  modified_base 10: mod_base = OTHER; note = 2'-O-methyladenosine-3'-phosphate
  modified_base 11: mod_base = OTHER; note = 2'-O-methyluridine-3'-phosphate
  modified_base 12: mod_base = OTHER; note = 2'-O-methylcytidine-3'-phosphate
  modified_base 13: mod_base = OTHER; note = 2'-O-methyluridine-3'-phosphate
  modified_base 14: mod_base = OTHER; note = 2'-deoxy-2'-fluoroadenosine-3'-phosphate
  modified_base 15: mod_base = OTHER; note = 2'-O-methylguanosine-3'-phosphate
  modified_base 16: mod_base = OTHER; note = 2'-deoxy-2'-fluoroguanosine-3'-phosphate
  modified_base 17: mod_base = OTHER; note = 2'-O-methyluridine-3'-phosphate
  modified_base 18: mod_base = OTHER; note = 2'-O-methylcytidine-3'-phosphate
  modified_base 19: mod_base = OTHER; note = 2'-O-methyluridine-3'-phosphate
  modified_base 20: mod_base = OTHER; note = 2'-O-methylguanosine-3'-phosphate
  modified_base 21: mod_base = OTHER; note = 2'-O-methyluridine-3'-phosphate
  modified_base 22: mod_base = OTHER; note = 2'-O-methylguanosine-3'-phosphate
  modified_base 23: mod_base = OTHER; note = 2'-O-methylguanosine
taggtgagaatctaggtctgtgg

SEQ ID NO: 4651 - RNA, 23 nt, synthetic construct
  source 1..23: mol_type = other RNA
  modified_base 1: mod_base = OTHER; note = 2'-O-methyluridine-3'-phosphate 5'phosphate
  modified_base 2: mod_base = OTHER; note = 2'-deoxy-2'-fluorocytidine-3'-phosphate
  modified_base 3: mod_base = OTHER; note = 2'-O-methyladenosine-3'-phosphate
  modified_base 4: mod_base = OTHER; note = 2'-O-methylguanosine-3'-phosphate
  modified_base 5: mod_base = OTHER; note = 2'-O-methylguanosine-3'-phosphate
  modified_base 6: mod_base = OTHER; note = 2'-deoxy-2'-fluorouridine-3'-phosphate
  modified_base 7: mod_base = OTHER; note = 2'-O-methylguanosine-3'-phosphate
  modified_base 8: mod_base = OTHER; note = 2'-O-methyladenosine-3'-phosphate
  modified_base 9: mod_base = OTHER; note = 2'-O-methylguanosine-3'-phosphate
  modified_base 10: mod_base = OTHER; note = 2'-O-methyladenosine-3'-phosphate
  modified_base 11: mod_base = OTHER; note = 2'-O-methyladenosine-3'-phosphate
  modified_base 12: mod_base = OTHER; note = 2'-O-methyluridine-3'-phosphate
  modified_base 13: mod_base = OTHER; note = 2'-O-methylcytidine-3'-phosphate
  modified_base 14: mod_base = OTHER; note = 2'-deoxy-2'-fluorouridine-3'-phosphate
  modified_base 15: mod_base = OTHER; note = 2'-O-methyladenosine-3'-phosphate
  modified_base 16: mod_base = OTHER; note = 2'-deoxy-2'-fluoroguanosine-3'-phosphate
  modified_base 17: mod_base = OTHER; note = 2'-O-methylguanosine-3'-phosphate
  modified_base 18: mod_base = OTHER; note = 2'-O-methyluridine-3'-phosphate
  modified_base 19: mod_base = OTHER; note = 2'-O-methylcytidine-3'-phosphate
  modified_base 20: mod_base = OTHER; note = 2'-O-methyluridine-3'-phosphate
  modified_base 21: mod_base = OTHER; note = 2'-O-methylguanosine-3'-phosphate
  modified_base 22: mod_base = OTHER; note = 2'-O-methyluridine-3'-phosphate
  modified_base 23: mod_base = OTHER; note = 2'-O-methylguanosine
tcaggtgagaatctaggtctgtg

SEQ ID NO: 4652 - RNA, 23 nt, synthetic construct
  source 1..23: mol_type = other RNA
  modified_base 1: mod_base = OTHER; note = 2'-O-methyluridine-3'-phosphate 5'phosphate
  modified_base 2: mod_base = OTHER; note = 2'-deoxy-2'-fluoroadenosine-3'-phosphate
  modified_base 3: mod_base = OTHER; note = 2'-O-methylguanosine-3'-phosphate
  modified_base 4: mod_base = OTHER; note = 2'-O-methylcytidine-3'-phosphate
  modified_base 5: mod_base = OTHER; note = 2'-O-methyladenosine-3'-phosphate
  modified_base 6: mod_base = OTHER; note = 2'-deoxy-2'-fluoroguanosine-3'-phosphate
  modified_base 7: mod_base = OTHER; note = 2'-O-methylguanosine-3'-phosphate
  modified_base 8: mod_base = OTHER; note = 2'-O-methyluridine-3'-phosphate
  modified_base 9: mod_base = OTHER; note = 2'-O-methylguanosine-3'-phosphate
  modified_base 10: mod_base = OTHER; note = 2'-O-methyladenosine-3'-phosphate
  modified_base 11: mod_base = OTHER; note = 2'-O-methylguanosine-3'-phosphate
  modified_base 12: mod_base = OTHER; note = 2'-O-methyladenosine-3'-phosphate
  modified_base 13: mod_base = OTHER; note = 2'-O-methyladenosine-3'-phosphate
  modified_base 14: mod_base = OTHER; note = 2'-deoxy-2'-fluorouridine-3'-phosphate
  modified_base 15: mod_base = OTHER; note = 2'-O-methylcytidine-3'-phosphate
  modified_base 16: mod_base = OTHER; note = 2'-deoxy-2'-fluorouridine-3'-phosphate
  modified_base 17: mod_base = OTHER; note = 2'-O-methyladenosine-3'-phosphate
  modified_base 18: mod_base = OTHER; note = 2'-O-methylguanosine-3'-phosphate
  modified_base 19: mod_base = OTHER; note = 2'-O-methylguanosine-3'-phosphate
  modified_base 20: mod_base = OTHER; note = 2'-O-methyluridine-3'-phosphate
  modified_base 21: mod_base = OTHER; note = 2'-O-methylcytidine-3'-phosphate
  modified_base 22: mod_base = OTHER; note = 2'-O-methyluridine-3'-phosphate
  modified_base 23: mod_base = OTHER; note = 2'-O-methylguanosine
tagcaggtgagaatctaggtctg

SEQ ID NO: 4653 - RNA, 23 nt, synthetic construct
  source 1..23: mol_type = other RNA
  modified_base 1: mod_base = OTHER; note = 2'-O-methyluridine-3'-phosphate 5'phosphate
  modified_base 2: mod_base = OTHER; note = 2'-deoxy-2'-fluorouridine-3'-phosphate
  modified_base 3: mod_base = OTHER; note = 2'-O-methyladenosine-3'-phosphate
  modified_base 4: mod_base = OTHER; note = 2'-O-methylguanosine-3'-phosphate
  modified_base 5: mod_base = OTHER; note = 2'-O-methylcytidine-3'-phosphate
  modified_base 6: mod_base = OTHER; note = 2'-deoxy-2'-fluoroadenosine-3'-phosphate
  modified_base 7: mod_base = OTHER; note = 2'-O-methylguanosine-3'-phosphate
  modified_base 8: mod_base = OTHER; note = 2'-O-methylguanosine-3'-phosphate
  modified_base 9: mod_base = OTHER; note = 2'-O-methyluridine-3'-phosphate
  modified_base 10: mod_base = OTHER; note = 2'-O-methylguanosine-3'-phosphate
  modified_base 11: mod_base = OTHER; note = 2'-O-methyladenosine-3'-phosphate
  modified_base 12: mod_base = OTHER; note = 2'-O-methylguanosine-3'-phosphate
  modified_base 13: mod_base = OTHER; note = 2'-O-methyladenosine-3'-phosphate
  modified_base 14: mod_base = OTHER; note = 2'-deoxy-2'-fluoroadenosine-3'-phosphate
  modified_base 15: mod_base = OTHER; note = 2'-O-methyluridine-3'-phosphate
  modified_base 16: mod_base = OTHER; note = 2'-deoxy-2'-fluorocytidine-3'-phosphate
  modified_base 17: mod_base = OTHER; note = 2'-O-methyluridine-3'-phosphate
  modified_base 18: mod_base = OTHER; note = 2'-O-methyladenosine-3'-phosphate
  modified_base 19: mod_base = OTHER; note = 2'-O-methylguanosine-3'-phosphate
  modified_base 20: mod_base = OTHER; note = 2'-O-methylguanosine-3'-phosphate
  modified_base 21: mod_base = OTHER; note = 2'-O-methyluridine-3'-phosphate
  modified_base 22: mod_base = OTHER; note = 2'-O-methylcytidine-3'-phosphate
  modified_base 23: mod_base = OTHER; note = 2'-O-methyluridine
ttagcaggtgagaatctaggtct

SEQ ID NO: 4654 - RNA, 23 nt, synthetic construct
  source 1..23: mol_type = other RNA
  modified_base 1: mod_base = OTHER; note = 2'-O-methyluridine-3'-phosphate 5'phosphate
  modified_base 2: mod_base = OTHER; note = 2'-deoxy-2'-fluoroguanosine-3'-phosphate
  modified_base 3: mod_base = OTHER; note = 2'-O-methyluridine-3'-phosphate
  modified_base 4: mod_base = OTHER; note = 2'-O-methyladenosine-3'-phosphate
  modified_base 5: mod_base = OTHER; note = 2'-O-methylguanosine-3'-phosphate
  modified_base 6: mod_base = OTHER; note = 2'-deoxy-2'-fluorocytidine-3'-phosphate
  modified_base 7: mod_base = OTHER; note = 2'-O-methyladenosine-3'-phosphate
  modified_base 8: mod_base = OTHER; note = 2'-O-methylguanosine-3'-phosphate
  modified_base 9: mod_base = OTHER; note = 2'-O-methylguanosine-3'-phosphate
  modified_base 10: mod_base = OTHER; note = 2'-O-methyluridine-3'-phosphate
  modified_base 11: mod_base = OTHER; note = 2'-O-methylguanosine-3'-phosphate
  modified_base 12: mod_base = OTHER; note = 2'-O-methyladenosine-3'-phosphate
  modified_base 13: mod_base = OTHER; note = 2'-O-methylguanosine-3'-phosphate
  modified_base 14: mod_base = OTHER; note = 2'-deoxy-2'-fluoroadenosine-3'-phosphate
  modified_base 15: mod_base = OTHER; note = 2'-O-methyladenosine-3'-phosphate
  modified_base 16: mod_base = OTHER; note = 2'-deoxy-2'-fluorouridine-3'-phosphate
  modified_base 17: mod_base = OTHER; note = 2'-O-methylcytidine-3'-phosphate
  modified_base 18: mod_base = OTHER; note = 2'-O-methyluridine-3'-phosphate
  modified_base 19: mod_base = OTHER; note = 2'-O-methyladenosine-3'-phosphate
  modified_base 20: mod_base = OTHER; note = 2'-O-methylguanosine-3'-phosphate
  modified_base 21: mod_base = OTHER; note = 2'-O-methylguanosine-3'-phosphate
  modified_base 22: mod_base = OTHER; note = 2'-O-methyluridine-3'-phosphate
  modified_base 23: mod_base = OTHER; note = 2'-O-methylcytidine
tgtagcaggtgagaatctaggtc

SEQ ID NO: 4655 - RNA, 23 nt, synthetic construct
  source 1..23: mol_type = other RNA
  modified_base 1: mod_base = OTHER; note = 2'-O-methyluridine-3'-phosphate 5'phosphate
  modified_base 2: mod_base = OTHER; note = 2'-deoxy-2'-fluorouridine-3'-phosphate
  modified_base 3: mod_base = OTHER; note = 2'-O-methylcytidine-3'-phosphate
  modified_base 4: mod_base = OTHER; note = 2'-O-methyluridine-3'-phosphate
  modified_base 5: mod_base = OTHER; note = 2'-O-methylcytidine-3'-phosphate
  modified_base 6: mod_base = OTHER; note = 2'-deoxy-2'-fluorocytidine-3'-phosphate
  modified_base 7: mod_base = OTHER; note = 2'-O-methyluridine-3'-phosphate
  modified_base 8: mod_base = OTHER; note = 2'-O-methylcytidine-3'-phosphate
  modified_base 9: mod_base = OTHER; note = 2'-O-methylcytidine-3'-phosphate
  modified_base 10: mod_base = OTHER; note = 2'-O-methyladenosine-3'-phosphate
  modified_base 11: mod_base = OTHER; note = 2'-O-methylguanosine-3'-phosphate
  modified_base 12: mod_base = OTHER; note = 2'-O-methyluridine-3'-phosphate
  modified_base 13: mod_base = OTHER; note = 2'-O-methylcytidine-3'-phosphate
  modified_base 14: mod_base = OTHER; note = 2'-deoxy-2'-fluorocytidine-3'-phosphate
  modified_base 15: mod_base = OTHER; note = 2'-O-methylcytidine-3'-phosphate
  modified_base 16: mod_base = OTHER; note = 2'-deoxy-2'-fluorouridine-3'-phosphate
  modified_base 17: mod_base = OTHER; note = 2'-O-methylcytidine-3'-phosphate
  modified_base 18: mod_base = OTHER; note = 2'-O-methyluridine-3'-phosphate
  modified_base 19: mod_base = OTHER; note = 2'-O-methylguanosine-3'-phosphate
  modified_base 20: mod_base = OTHER; note = 2'-O-methyladenosine-3'-phosphate
  modified_base 21: mod_base = OTHER; note = 2'-O-methylguanosine-3'-phosphate
  modified_base 22: mod_base = OTHER; note = 2'-O-methylguanosine-3'-phosphate
  modified_base 23: mod_base = OTHER; note = 2'-O-methylguanosine
ttctcctccagtccctctgaggg

SEQ ID NO: 4656 - RNA, 23 nt, synthetic construct
  source 1..23: mol_type = other RNA
  modified_base 1: mod_base = OTHER; note = 2'-O-methyluridine-3'-phosphate 5'phosphate
  modified_base 2: mod_base = OTHER; note = 2'-deoxy-2'-fluorouridine-3'-phosphate
  modified_base 3: mod_base = OTHER; note = 2'-O-methyluridine-3'-phosphate
  modified_base 4: mod_base = OTHER; note = 2'-O-methylcytidine-3'-phosphate
  modified_base 5: mod_base = OTHER; note = 2'-O-methyluridine-3'-phosphate
  modified_base 6: mod_base = OTHER; note = 2'-deoxy-2'-fluorocytidine-3'-phosphate
  modified_base 7: mod_base = OTHER; note = 2'-O-methylcytidine-3'-phosphate
  modified_base 8: mod_base = OTHER; note = 2'-O-methyluridine-3'-phosphate
  modified_base 9: mod_base = OTHER; note = 2'-O-methylcytidine-3'-phosphate
  modified_base 10: mod_base = OTHER; note = 2'-O-methylcytidine-3'-phosphate
  modified_base 11: mod_base = OTHER; note = 2'-O-methyladenosine-3'-phosphate
  modified_base 12: mod_base = OTHER; note = 2'-O-methylguanosine-3'-phosphate
  modified_base 13: mod_base = OTHER; note = 2'-O-methyluridine-3'-phosphate
  modified_base 14: mod_base = OTHER; note = 2'-deoxy-2'-fluorocytidine-3'-phosphate
  modified_base 15: mod_base = OTHER; note = 2'-O-methylcytidine-3'-phosphate
  modified_base 16: mod_base = OTHER; note = 2'-deoxy-2'-fluorocytidine-3'-phosphate
  modified_base 17: mod_base = OTHER; note = 2'-O-methyluridine-3'-phosphate
  modified_base 18: mod_base = OTHER; note = 2'-O-methylcytidine-3'-phosphate
  modified_base 19: mod_base = OTHER; note = 2'-O-methyluridine-3'-phosphate
  modified_base 20: mod_base = OTHER; note = 2'-O-methylguanosine-3'-phosphate
  modified_base 21: mod_base = OTHER; note = 2'-O-methyladenosine-3'-phosphate
  modified_base 22: mod_base = OTHER; note = 2'-O-methylguanosine-3'-phosphate
  modified_base 23: mod_base = OTHER; note = 2'-O-methylguanosine
tttctcctccagtccctctgagg

SEQ ID NO: 4657 - RNA, 23 nt, synthetic construct
  source 1..23: mol_type = other RNA
  modified_base 1: mod_base = OTHER; note = 2'-O-methyluridine-3'-phosphate 5'phosphate
  modified_base 2: mod_base = OTHER; note = 2'-deoxy-2'-fluoroguanosine-3'-phosphate
  modified_base 3: mod_base = OTHER; note = 2'-O-methyluridine-3'-phosphate
  modified_base 4: mod_base = OTHER; note = 2'-O-methyluridine-3'-phosphate
  modified_base 5: mod_base = OTHER; note = 2'-O-methylcytidine-3'-phosphate
  modified_base 6: mod_base = OTHER; note = 2'-deoxy-2'-fluorouridine-3'-phosphate
  modified_base 7: mod_base = OTHER; note = 2'-O-methylcytidine-3'-phosphate
  modified_base 8: mod_base = OTHER; note = 2'-O-methylcytidine-3'-phosphate
  modified_base 9: mod_base = OTHER; note = 2'-O-methyluridine-3'-phosphate
  modified_base 10: mod_base = OTHER; note = 2'-O-methylcytidine-3'-phosphate
  modified_base 11: mod_base = OTHER; note = 2'-O-methylcytidine-3'-phosphate
  modified_base 12: mod_base = OTHER; note = 2'-O-methyladenosine-3'-phosphate
  modified_base 13: mod_base = OTHER; note = 2'-O-methylguanosine-3'-phosphate
  modified_base 14: mod_base = OTHER; note = 2'-deoxy-2'-fluorouridine-3'-phosphate
  modified_base 15: mod_base = OTHER; note = 2'-O-methylcytidine-3'-phosphate
  modified_base 16: mod_base = OTHER; note = 2'-deoxy-2'-fluorocytidine-3'-phosphate
  modified_base 17: mod_base = OTHER; note = 2'-O-methylcytidine-3'-phosphate
  modified_base 18: mod_base = OTHER; note = 2'-O-methyluridine-3'-phosphate
  modified_base 19: mod_base = OTHER; note = 2'-O-methylcytidine-3'-phosphate
  modified_base 20: mod_base = OTHER; note = 2'-O-methyluridine-3'-phosphate
  modified_base 21: mod_base = OTHER; note = 2'-O-methylguanosine-3'-phosphate
  modified_base 22: mod_base = OTHER; note = 2'-O-methyladenosine-3'-phosphate
  modified_base 23: mod_base = OTHER; note = 2'-O-methylguanosine
tgttctcctccagtccctctgag

SEQ ID NO: 4658 - RNA, 23 nt, synthetic construct
  source 1..23: mol_type = other RNA
  modified_base 1: mod_base = OTHER; note = 2'-O-methyluridine-3'-phosphate 5'phosphate
  modified_base 2: mod_base = OTHER; note = 2'-deoxy-2'-fluoroadenosine-3'-phosphate
  modified_base 3: mod_base = OTHER; note = 2'-O-methylguanosine-3'-phosphate
  modified_base 4: mod_base = OTHER; note = 2'-O-methyluridine-3'-phosphate
  modified_base 5: mod_base = OTHER; note = 2'-O-methyluridine-3'-phosphate
  modified_base 6: mod_base = OTHER; note = 2'-deoxy-2'-fluorocytidine-3'-phosphate
  modified_base 7: mod_base = OTHER; note = 2'-O-methyluridine-3'-phosphate
  modified_base 8: mod_base = OTHER; note = 2'-O-methylcytidine-3'-phosphate
  modified_base 9: mod_base = OTHER; note = 2'-O-methylcytidine-3'-phosphate
  modified_base 10: mod_base = OTHER; note = 2'-O-methyluridine-3'-phosphate
  modified_base 11: mod_base = OTHER; note = 2'-O-methylcytidine-3'-phosphate
  modified_base 12: mod_base = OTHER; note = 2'-O-methylcytidine-3'-phosphate
  modified_base 13: mod_base = OTHER; note = 2'-O-methyladenosine-3'-phosphate
  modified_base 14: mod_base = OTHER; note = 2'-deoxy-2'-fluoroguanosine-3'-phosphate
  modified_base 15: mod_base = OTHER; note = 2'-O-methyluridine-3'-phosphate
  modified_base 16: mod_base = OTHER; note = 2'-deoxy-2'-fluorocytidine-3'-phosphate
  modified_base 17: mod_base = OTHER; note = 2'-O-methylcytidine-3'-phosphate
  modified_base 18: mod_base = OTHER; note = 2'-O-methylcytidine-3'-phosphate
  modified_base 19: mod_base = OTHER; note = 2'-O-methyluridine-3'-phosphate
  modified_base 20: mod_base = OTHER; note = 2'-O-methylcytidine-3'-phosphate
  modified_base 21: mod_base = OTHER; note = 2'-O-methyluridine-3'-phosphate
  modified_base 22: mod_base = OTHER; note = 2'-O-methylguanosine-3'-phosphate
  modified_base 23: mod_base = OTHER; note = 2'-O-methyladenosine
tagttctcctccagtccctctga

SEQ ID NO: 4659 - RNA, 23 nt, synthetic construct
  source 1..23: mol_type = other RNA
  modified_base 1: mod_base = OTHER; note = 2'-O-methyluridine-3'-phosphate 5'phosphate
  modified_base 2: mod_base = OTHER; note = 2'-deoxy-2'-fluorouridine-3'-phosphate
  modified_base 3: mod_base = OTHER; note = 2'-O-methyladenosine-3'-phosphate
  modified_base 4: mod_base = OTHER; note = 2'-O-methylguanosine-3'-phosphate
  modified_base 5: mod_base = OTHER; note = 2'-O-methyluridine-3'-phosphate
  modified_base 6: mod_base = OTHER; note = 2'-deoxy-2'-fluorouridine-3'-phosphate
  modified_base 7: mod_base = OTHER; note = 2'-O-methylcytidine-3'-phosphate
  modified_base 8: mod_base = OTHER; note = 2'-O-methyluridine-3'-phosphate
  modified_base 9: mod_base = OTHER; note = 2'-O-methylcytidine-3'-phosphate
  modified_base 10: mod_base = OTHER; note = 2'-O-methylcytidine-3'-phosphate
  modified_base 11: mod_base = OTHER; note = 2'-O-methyluridine-3'-phosphate
  modified_base 12: mod_base = OTHER; note = 2'-O-methylcytidine-3'-phosphate
  modified_base 13: mod_base = OTHER; note = 2'-O-methylcytidine-3'-phosphate
  modified_base 14: mod_base = OTHER; note = 2'-deoxy-2'-fluoroadenosine-3'-phosphate
  modified_base 15: mod_base = OTHER; note = 2'-O-methylguanosine-3'-phosphate
  modified_base 16: mod_base = OTHER; note = 2'-deoxy-2'-fluorouridine-3'-phosphate
  modified_base 17: mod_base = OTHER; note = 2'-O-methylcytidine-3'-phosphate
  modified_base 18: mod_base = OTHER; note = 2'-O-methylcytidine-3'-phosphate
  modified_base 19: mod_base = OTHER; note = 2'-O-methylcytidine-3'-phosphate
  modified_base 20: mod_base = OTHER; note = 2'-O-methyluridine-3'-phosphate
  modified_base 21: mod_base = OTHER; note = 2'-O-methylcytidine-3'-phosphate
  modified_base 22: mod_base = OTHER; note = 2'-O-methyluridine-3'-phosphate
  modified_base 23: mod_base = OTHER; note = 2'-O-methylguanosine
ttagttctcctccagtccctctg

SEQ ID NO: 4660 - RNA, 23 nt, synthetic construct
  source 1..23: mol_type = other RNA
  modified_base 1: mod_base = OTHER; note = 2'-O-methyluridine-3'-phosphate 5'phosphate
  modified_base 2: mod_base = OTHER; note = 2'-deoxy-2'-fluoroguanosine-3'-phosphate
  modified_base 3: mod_base = OTHER; note = 2'-O-methyluridine-3'-phosphate
  modified_base 4: mod_base = OTHER; note = 2'-O-methyladenosine-3'-phosphate
  modified_base 5: mod_base = OTHER; note = 2'-O-methylguanosine-3'-phosphate
  modified_base 6: mod_base = OTHER; note = 2'-deoxy-2'-fluorouridine-3'-phosphate
  modified_base 7: mod_base = OTHER; note = 2'-O-methyluridine-3'-phosphate
  modified_base 8: mod_base = OTHER; note = 2'-O-methylcytidine-3'-phosphate
  modified_base 9: mod_base = OTHER; note = 2'-O-methyluridine-3'-phosphate
  modified_base 10: mod_base = OTHER; note = 2'-O-methylcytidine-3'-phosphate
  modified_base 11: mod_base = OTHER; note = 2'-O-methylcytidine-3'-phosphate
  modified_base 12: mod_base = OTHER; note = 2'-O-methyluridine-3'-phosphate
  modified_base 13: mod_base = OTHER; note = 2'-O-methylcytidine-3'-phosphate
  modified_base 14: mod_base = OTHER; note = 2'-deoxy-2'-fluorocytidine-3'-phosphate
  modified_base 15: mod_base = OTHER; note = 2'-O-methyladenosine-3'-phosphate
  modified_base 16: mod_base = OTHER; note = 2'-deoxy-2'-fluoroguanosine-3'-phosphate
  modified_base 17: mod_base = OTHER; note = 2'-O-methyluridine-3'-phosphate
  modified_base 18: mod_base = OTHER; note = 2'-O-methylcytidine-3'-phosphate
  modified_base 19: mod_base = OTHER; note = 2'-O-methylcytidine-3'-phosphate
  modified_base 20: mod_base = OTHER; note = 2'-O-methylcytidine-3'-phosphate
  modified_base 21: mod_base = OTHER; note = 2'-O-methyluridine-3'-phosphate
  modified_base 22: mod_base = OTHER; note = 2'-O-methylcytidine-3'-phosphate
  modified_base 23: mod_base = OTHER; note = 2'-O-methyluridine
tgtagttctcctccagtccctct

SEQ ID NO: 4661 - RNA, 23 nt, synthetic construct
  source 1..23: mol_type = other RNA
  modified_base 1: mod_base = OTHER; note = 2'-O-methyluridine-3'-phosphate 5'phosphate
  modified_base 2: mod_base = OTHER; note = 2'-deoxy-2'-fluoroadenosine-3'-phosphate
  modified_base 3: mod_base = OTHER; note = 2'-O-methylguanosine-3'-phosphate
  modified_base 4: mod_base = OTHER; note = 2'-O-methyluridine-3'-phosphate
  modified_base 5: mod_base = OTHER; note = 2'-O-methyladenosine-3'-phosphate
  modified_base 6: mod_base = OTHER; note = 2'-deoxy-2'-fluoroguanosine-3'-phosphate
  modified_base 7: mod_base = OTHER; note = 2'-O-methyluridine-3'-phosphate
  modified_base 8: mod_base = OTHER; note = 2'-O-methyluridine-3'-phosphate
  modified_base 9: mod_base = OTHER; note = 2'-O-methylcytidine-3'-phosphate
  modified_base 10: mod_base = OTHER; note = 2'-O-methyluridine-3'-phosphate
  modified_base 11: mod_base = OTHER; note = 2'-O-methylcytidine-3'-phosphate
  modified_base 12: mod_base = OTHER; note = 2'-O-methylcytidine-3'-phosphate
  modified_base 13: mod_base = OTHER; note = 2'-O-methyluridine-3'-phosphate
  modified_base 14: mod_base = OTHER; note = 2'-deoxy-2'-fluorocytidine-3'-phosphate
  modified_base 15: mod_base = OTHER; note = 2'-O-methylcytidine-3'-phosphate
  modified_base 16: mod_base = OTHER; note = 2'-deoxy-2'-fluoroadenosine-3'-phosphate
  modified_base 17: mod_base = OTHER; note = 2'-O-methylguanosine-3'-phosphate
  modified_base 18: mod_base = OTHER; note = 2'-O-methyluridine-3'-phosphate
  modified_base 19: mod_base = OTHER; note = 2'-O-methylcytidine-3'-phosphate
  modified_base 20: mod_base = OTHER; note = 2'-O-methylcytidine-3'-phosphate
  modified_base 21: mod_base = OTHER; note = 2'-O-methylcytidine-3'-phosphate
  modified_base 22: mod_base = OTHER; note = 2'-O-methyluridine-3'-phosphate
  modified_base 23: mod_base = OTHER; note = 2'-O-methylcytidine
tagtagttctcctccagtccctc

SEQ ID NO: 4662 - RNA, 23 nt, synthetic construct
  source 1..23: mol_type = other RNA
  modified_base 1: mod_base = OTHER; note = 2'-O-methyluridine-3'-phosphate 5'phosphate
  modified_base 2: mod_base = OTHER; note = 2'-deoxy-2'-fluorocytidine-3'-phosphate
  modified_base 3: mod_base = OTHER; note = 2'-O-methyladenosine-3'-phosphate
  modified_base 4: mod_base = OTHER; note = 2'-O-methylguanosine-3'-phosphate
  modified_base 5: mod_base = OTHER; note = 2'-O-methyluridine-3'-phosphate
  modified_base 6: mod_base = OTHER; note = 2'-deoxy-2'-fluoroadenosine-3'-phosphate
  modified_base 7: mod_base = OTHER; note = 2'-O-methylguanosine-3'-phosphate
  modified_base 8: mod_base = OTHER; note = 2'-O-methyluridine-3'-phosphate
  modified_base 9: mod_base = OTHER; note = 2'-O-methyluridine-3'-phosphate
  modified_base 10: mod_base = OTHER; note = 2'-O-methylcytidine-3'-phosphate
  modified_base 11: mod_base = OTHER; note = 2'-O-methyluridine-3'-phosphate
  modified_base 12: mod_base = OTHER; note = 2'-O-methylcytidine-3'-phosphate
  modified_base 13: mod_base = OTHER; note = 2'-O-methylcytidine-3'-phosphate
  modified_base 14: mod_base = OTHER; note = 2'-deoxy-2'-fluorouridine-3'-phosphate
  modified_base 15: mod_base = OTHER; note = 2'-O-methylcytidine-3'-phosphate
  modified_base 16: mod_base = OTHER; note = 2'-deoxy-2'-fluorocytidine-3'-phosphate
  modified_base 17: mod_base = OTHER; note = 2'-O-methyladenosine-3'-phosphate
  modified_base 18: mod_base = OTHER; note = 2'-O-methylguanosine-3'-phosphate
  modified_base 19: mod_base = OTHER; note = 2'-O-methyluridine-3'-phosphate
  modified_base 20: mod_base = OTHER; note = 2'-O-methylcytidine-3'-phosphate
  modified_base 21: mod_base = OTHER; note = 2'-O-methylcytidine-3'-phosphate
  modified_base 22: mod_base = OTHER; note = 2'-O-methylcytidine-3'-phosphate
  modified_base 23: mod_base = OTHER; note = 2'-O-methyluridine
tcagtagttctcctccagtccct

SEQ ID NO: 4663 - RNA, 23 nt, synthetic construct
  source 1..23: mol_type = other RNA
  modified_base 1: mod_base = OTHER; note = 2'-O-methyluridine-3'-phosphate 5'phosphate
  modified_base 2: mod_base = OTHER; note = 2'-deoxy-2'-fluorouridine-3'-phosphate
  modified_base 3: mod_base = OTHER; note = 2'-O-methylguanosine-3'-phosphate
  modified_base 4: mod_base = OTHER; note = 2'-O-methylcytidine-3'-phosphate
  modified_base 5: mod_base = OTHER; note = 2'-O-methyladenosine-3'-phosphate
  modified_base 6: mod_base = OTHER; note = 2'-deoxy-2'-fluoroguanosine-3'-phosphate
  modified_base 7: mod_base = OTHER; note = 2'-O-methyluridine-3'-phosphate
  modified_base 8: mod_base = OTHER; note = 2'-O-methyladenosine-3'-phosphate
  modified_base 9: mod_base = OTHER; note = 2'-O-methylguanosine-3'-phosphate
  modified_base 10: mod_base = OTHER; note = 2'-O-methyluridine-3'-phosphate
  modified_base 11: mod_base = OTHER; note = 2'-O-methyluridine-3'-phosphate
  modified_base 12: mod_base = OTHER; note = 2'-O-methylcytidine-3'-phosphate
  modified_base 13: mod_base = OTHER; note = 2'-O-methyluridine-3'-phosphate
  modified_base 14: mod_base = OTHER; note = 2'-deoxy-2'-fluorocytidine-3'-phosphate
  modified_base 15: mod_base = OTHER; note = 2'-O-methylcytidine-3'-phosphate
  modified_base 16: mod_base = OTHER; note = 2'-deoxy-2'-fluorouridine-3'-phosphate
  modified_base 17: mod_base = OTHER; note = 2'-O-methylcytidine-3'-phosphate
  modified_base 18: mod_base = OTHER; note = 2'-O-methylcytidine-3'-phosphate
  modified_base 19: mod_base = OTHER; note = 2'-O-methyladenosine-3'-phosphate
  modified_base 20: mod_base = OTHER; note = 2'-O-methylguanosine-3'-phosphate
  modified_base 21: mod_base = OTHER; note = 2'-O-methyluridine-3'-phosphate
  modified_base 22: mod_base = OTHER; note = 2'-O-methylcytidine-3'-phosphate
  modified_base 23: mod_base = OTHER; note = 2'-O-methylcytidine
ttgcagtagttctcctccagtcc

SEQ ID NO: 4664 - RNA, 23 nt, synthetic construct
  source 1..23: mol_type = other RNA
  modified_base 1: mod_base = OTHER; note = 2'-O-methyluridine-3'-phosphate 5'phosphate
  modified_base 2: mod_base = OTHER; note = 2'-deoxy-2'-fluorocytidine-3'-phosphate
  modified_base 3: mod_base = OTHER; note = 2'-O-methyluridine-3'-phosphate
  modified_base 4: mod_base = OTHER; note = 2'-O-methylguanosine-3'-phosphate
  modified_base 5: mod_base = OTHER; note = 2'-O-methylcytidine-3'-phosphate
  modified_base 6: mod_base = OTHER; note = 2'-deoxy-2'-fluoroadenosine-3'-phosphate
  modified_base 7: mod_base = OTHER; note = 2'-O-methylguanosine-3'-phosphate
  modified_base 8: mod_base = OTHER; note = 2'-O-methyluridine-3'-phosphate
  modified_base 9: mod_base = OTHER; note = 2'-O-methyladenosine-3'-phosphate
  modified_base 10: mod_base = OTHER; note = 2'-O-methylguanosine-3'-phosphate
  modified_base 11: mod_base = OTHER; note = 2'-O-methyluridine-3'-phosphate
  modified_base 12: mod_base = OTHER; note = 2'-O-methyluridine-3'-phosphate
  modified_base 13: mod_base = OTHER; note = 2'-O-methylcytidine-3'-phosphate
  modified_base 14: mod_base = OTHER; note = 2'-deoxy-2'-fluorouridine-3'-phosphate
  modified_base 15: mod_base = OTHER; note = 2'-O-methylcytidine-3'-phosphate
  modified_base 16: mod_base = OTHER; note = 2'-deoxy-2'-fluorocytidine-3'-phosphate
  modified_base 17: mod_base = OTHER; note = 2'-O-methyluridine-3'-phosphate
  modified_base 18: mod_base = OTHER; note = 2'-O-methylcytidine-3'-phosphate
  modified_base 19: mod_base = OTHER; note = 2'-O-methylcytidine-3'-phosphate
  modified_base 20: mod_base = OTHER; note = 2'-O-methyladenosine-3'-phosphate
  modified_base 21: mod_base = OTHER; note = 2'-O-methylguanosine-3'-phosphate
  modified_base 22: mod_base = OTHER; note = 2'-O-methyluridine-3'-phosphate
  modified_base 23: mod_base = OTHER; note = 2'-O-methylcytidine
tctgcagtagttctcctccagtc

SEQ ID NO: 4665 - RNA, 23 nt, synthetic construct
  source 1..23: mol_type = other RNA
  modified_base 1: mod_base = OTHER; note = 2'-O-methyluridine-3'-phosphate 5'phosphate
  modified_base 2: mod_base = OTHER; note = 2'-deoxy-2'-fluorocytidine-3'-phosphate
  modified_base 3: mod_base = OTHER; note = 2'-O-methylcytidine-3'-phosphate
  modified_base 4: mod_base = OTHER; note = 2'-O-methyluridine-3'-phosphate
  modified_base 5: mod_base = OTHER; note = 2'-O-methylguanosine-3'-phosphate
  modified_base 6: mod_base = OTHER; note = 2'-deoxy-2'-fluorocytidine-3'-phosphate
  modified_base 7: mod_base = OTHER; note = 2'-O-methyladenosine-3'-phosphate
  modified_base 8: mod_base = OTHER; note = 2'-O-methylguanosine-3'-phosphate
  modified_base 9: mod_base = OTHER; note = 2'-O-methyluridine-3'-phosphate
  modified_base 10: mod_base = OTHER; note = 2'-O-methyladenosine-3'-phosphate
  modified_base 11: mod_base = OTHER; note = 2'-O-methylguanosine-3'-phosphate
  modified_base 12: mod_base = OTHER; note = 2'-O-methyluridine-3'-phosphate
  modified_base 13: mod_base = OTHER; note = 2'-O-methyluridine-3'-phosphate
  modified_base 14: mod_base = OTHER; note = 2'-deoxy-2'-fluorocytidine-3'-phosphate
  modified_base 15: mod_base = OTHER; note = 2'-O-methyluridine-3'-phosphate
  modified_base 16: mod_base = OTHER; note = 2'-deoxy-2'-fluorocytidine-3'-phosphate
  modified_base 17: mod_base = OTHER; note = 2'-O-methylcytidine-3'-phosphate
  modified_base 18: mod_base = OTHER; note = 2'-O-methyluridine-3'-phosphate
  modified_base 19: mod_base = OTHER; note = 2'-O-methylcytidine-3'-phosphate
  modified_base 20: mod_base = OTHER; note = 2'-O-methylcytidine-3'-phosphate
  modified_base 21: mod_base = OTHER; note = 2'-O-methyladenosine-3'-phosphate
  modified_base 22: mod_base = OTHER; note = 2'-O-methylguanosine-3'-phosphate
  modified_base 23: mod_base = OTHER; note = 2'-O-methyluridine
tcctgcagtagttctcctccagt

SEQ ID NO: 4666 - RNA, 23 nt, synthetic construct
  source 1..23: mol_type = other RNA
  modified_base 1: mod_base = OTHER; note = 2'-O-methyluridine-3'-phosphate 5'phosphate
  modified_base 2: mod_base = OTHER; note = 2'-deoxy-2'-fluorouridine-3'-phosphate
  modified_base 3: mod_base = OTHER; note = 2'-O-methyluridine-3'-phosphate
  modified_base 4: mod_base = OTHER; note = 2'-O-methylcytidine-3'-phosphate
  modified_base 5: mod_base = OTHER; note = 2'-O-methylcytidine-3'-phosphate
  modified_base 6: mod_base = OTHER; note = 2'-deoxy-2'-fluorouridine-3'-phosphate
  modified_base 7: mod_base = OTHER; note = 2'-O-methylguanosine-3'-phosphate
  modified_base 8: mod_base = OTHER; note = 2'-O-methylcytidine-3'-phosphate
  modified_base 9: mod_base = OTHER; note = 2'-O-methyladenosine-3'-phosphate
  modified_base 10: mod_base = OTHER; note = 2'-O-methylguanosine-3'-phosphate
  modified_base 11: mod_base = OTHER; note = 2'-O-methyluridine-3'-phosphate
  modified_base 12: mod_base = OTHER; note = 2'-O-methyladenosine-3'-phosphate
  modified_base 13: mod_base = OTHER; note = 2'-O-methylguanosine-3'-phosphate
  modified_base 14: mod_base = OTHER; note = 2'-deoxy-2'-fluorouridine-3'-phosphate
  modified_base 15: mod_base = OTHER; note = 2'-O-methyluridine-3'-phosphate
  modified_base 16: mod_base = OTHER; note = 2'-deoxy-2'-fluorocytidine-3'-phosphate
  modified_base 17: mod_base = OTHER; note = 2'-O-methyluridine-3'-phosphate
  modified_base 18: mod_base = OTHER; note = 2'-O-methylcytidine-3'-phosphate
  modified_base 19: mod_base = OTHER; note = 2'-O-methylcytidine-3'-phosphate
  modified_base 20: mod_base = OTHER; note = 2'-O-methyluridine-3'-phosphate
  modified_base 21: mod_base = OTHER; note = 2'-O-methylcytidine-3'-phosphate
  modified_base 22: mod_base = OTHER; note = 2'-O-methylcytidine-3'-phosphate
  modified_base 23: mod_base = OTHER; note = 2'-O-methyladenosine
tttcctgcagtagttctcctcca

SEQ ID NO: 4667 - RNA, 23 nt, synthetic construct
  source 1..23: mol_type = other RNA
  modified_base 1: mod_base = OTHER; note = 2'-O-methyluridine-3'-phosphate 5'phosphate
  modified_base 2: mod_base = OTHER; note = 2'-deoxy-2'-fluorouridine-3'-phosphate
  modified_base 3: mod_base = OTHER; note = 2'-O-methylguanosine-3'-phosphate
  modified_base 4: mod_base = OTHER; note = 2'-O-methylcytidine-3'-phosphate
  modified_base 5: mod_base = OTHER; note = 2'-O-methylguanosine-3'-phosphate
  modified_base 6: mod_base = OTHER; note = 2'-deoxy-2'-fluoroguanosine-3'-phosphate
  modified_base 7: mod_base = OTHER; note = 2'-O-methyladenosine-3'-phosphate
  modified_base 8: mod_base = OTHER; note = 2'-O-methyluridine-3'-phosphate
  modified_base 9: mod_base = OTHER; note = 2'-O-methylcytidine-3'-phosphate
  modified_base 10: mod_base = OTHER; note = 2'-O-methylguanosine-3'-phosphate
  modified_base 11: mod_base = OTHER; note = 2'-O-methyluridine-3'-phosphate
  modified_base 12: mod_base = OTHER; note = 2'-O-methyluridine-3'-phosphate
  modified_base 13: mod_base = OTHER; note = 2'-O-methylguanosine-3'-phosphate
  modified_base 14: mod_base = OTHER; note = 2'-deoxy-2'-fluorouridine-3'-phosphate
  modified_base 15: mod_base = OTHER; note = 2'-O-methylcytidine-3'-phosphate
  modified_base 16: mod_base = OTHER; note = 2'-deoxy-2'-fluorouridine-3'-phosphate
  modified_base 17: mod_base = OTHER; note = 2'-O-methylguanosine-3'-phosphate
  modified_base 18: mod_base = OTHER; note = 2'-O-methylguanosine-3'-phosphate
  modified_base 19: mod_base = OTHER; note = 2'-O-methyladenosine-3'-phosphate
  modified_base 20: mod_base = OTHER; note = 2'-O-methyluridine-3'-phosphate
  modified_base 21: mod_base = OTHER; note = 2'-O-methyluridine-3'-phosphate
  modified_base 22: mod_base = OTHER; note = 2'-O-methylcytidine-3'-phosphate
  modified_base 23: mod_base = OTHER; note = 2'-O-methylcytidine
ttgcggatcgttgtctggattcc

SEQ ID NO: 4668 - RNA, 23 nt, synthetic construct
  source 1..23: mol_type = other RNA
  modified_base 1: mod_base = OTHER; note = 2'-O-methyluridine-3'-phosphate 5'phosphate
  modified_base 2: mod_base = OTHER; note = 2'-deoxy-2'-fluorocytidine-3'-phosphate
  modified_base 3: mod_base = OTHER; note = 2'-O-methylcytidine-3'-phosphate
  modified_base 4: mod_base = OTHER; note = 2'-O-methyluridine-3'-phosphate
  modified_base 5: mod_base = OTHER; note = 2'-O-methylguanosine-3'-phosphate
  modified_base 6: mod_base = OTHER; note = 2'-deoxy-2'-fluorocytidine-3'-phosphate
  modified_base 7: mod_base = OTHER; note = 2'-O-methylguanosine-3'-phosphate
  modified_base 8: mod_base = OTHER; note = 2'-O-methylguanosine-3'-phosphate
  modified_base 9: mod_base = OTHER; note = 2'-O-methyladenosine-3'-phosphate
  modified_base 10: mod_base = OTHER; note = 2'-O-methyluridine-3'-phosphate
  modified_base 11: mod_base = OTHER; note = 2'-O-methylcytidine-3'-phosphate
  modified_base 12: mod_base = OTHER; note = 2'-O-methylguanosine-3'-phosphate
  modified_base 13: mod_base = OTHER; note = 2'-O-methyluridine-3'-phosphate
  modified_base 14: mod_base = OTHER; note = 2'-deoxy-2'-fluorouridine-3'-phosphate
  modified_base 15: mod_base = OTHER; note = 2'-O-methylguanosine-3'-phosphate
  modified_base 16: mod_base = OTHER; note = 2'-deoxy-2'-fluorouridine-3'-phosphate
  modified_base 17: mod_base = OTHER; note = 2'-O-methylcytidine-3'-phosphate
  modified_base 18: mod_base = OTHER; note = 2'-O-methyluridine-3'-phosphate
  modified_base 19: mod_base = OTHER; note = 2'-O-methylguanosine-3'-phosphate
  modified_base 20: mod_base = OTHER; note = 2'-O-methylguanosine-3'-phosphate
  modified_base 21: mod_base = OTHER; note = 2'-O-methyladenosine-3'-phosphate
  modified_base 22: mod_base = OTHER; note = 2'-O-methyluridine-3'-phosphate
  modified_base 23: mod_base = OTHER; note = 2'-O-methyluridine
tcctgcggatcgttgtctggatt

SEQ ID NO: 4669 - RNA, 23 nt, synthetic construct
  source 1..23: mol_type = other RNA
  modified_base 1: mod_base = OTHER; note = 2'-O-methyluridine-3'-phosphate 5'phosphate
  modified_base 2: mod_base = OTHER; note = 2'-deoxy-2'-fluorouridine-3'-phosphate
  modified_base 3: mod_base = OTHER; note = 2'-O-methylcytidine-3'-phosphate
  modified_base 4: mod_base = OTHER; note = 2'-O-methyluridine-3'-phosphate
  modified_base 5: mod_base = OTHER; note = 2'-O-methylguanosine-3'-phosphate
  modified_base 6: mod_base = OTHER; note = 2'-deoxy-2'-fluoroguanosine-3'-phosphate
  modified_base 7: mod_base = OTHER; note = 2'-O-methyladenosine-3'-phosphate
  modified_base 8: mod_base = OTHER; note = 2'-O-methyluridine-3'-phosphate
  modified_base 9: mod_base = OTHER; note = 2'-O-methylcytidine-3'-phosphate
  modified_base 10: mod_base = OTHER; note = 2'-O-methyladenosine-3'-phosphate
  modified_base 11: mod_base = OTHER; note = 2'-O-methylguanosine-3'-phosphate
  modified_base 12: mod_base = OTHER; note = 2'-O-methyluridine-3'-phosphate
  modified_base 13: mod_base = OTHER; note = 2'-O-methyladenosine-3'-phosphate
  modified_base 14: mod_base = OTHER; note = 2'-deoxy-2'-fluoroguanosine-3'-phosphate
  modified_base 15: mod_base = OTHER; note = 2'-O-methyluridine-3'-phosphate
  modified_base 16: mod_base = OTHER; note = 2'-deoxy-2'-fluoroadenosine-3'-phosphate
  modified_base 17: mod_base = OTHER; note = 2'-O-methyluridine-3'-phosphate
  modified_base 18: mod_base = OTHER; note = 2'-O-methyladenosine-3'-phosphate
  modified_base 19: mod_base = OTHER; note = 2'-O-methylguanosine-3'-phosphate
  modified_base 20: mod_base = OTHER; note = 2'-O-methylcytidine-3'-phosphate
  modified_base 21: mod_base = OTHER; note = 2'-O-methyladenosine-3'-phosphate
  modified_base 22: mod_base = OTHER; note = 2'-O-methylcytidine-3'-phosphate
  modified_base 23: mod_base = OTHER; note = 2'-O-methylcytidine
ttctggatcagtagtatagcacc

SEQ ID NO: 4670 - RNA, 23 nt, synthetic construct
  source 1..23: mol_type = other RNA
  modified_base 1: mod_base = OTHER; note = 2'-O-methyluridine-3'-phosphate 5'phosphate
  modified_base 2: mod_base = OTHER; note = 2'-deoxy-2'-fluorouridine-3'-phosphate
  modified_base 3: mod_base = OTHER; note = 2'-O-methyluridine-3'-phosphate
  modified_base 4: mod_base = OTHER; note = 2'-O-methylcytidine-3'-phosphate
  modified_base 5: mod_base = OTHER; note = 2'-O-methyluridine-3'-phosphate
  modified_base 6: mod_base = OTHER; note = 2'-deoxy-2'-fluoroguanosine-3'-phosphate
  modified_base 7: mod_base = OTHER; note = 2'-O-methylguanosine-3'-phosphate
  modified_base 8: mod_base = OTHER; note = 2'-O-methyladenosine-3'-phosphate
  modified_base 9: mod_base = OTHER; note = 2'-O-methyluridine-3'-phosphate
  modified_base 10: mod_base = OTHER; note = 2'-O-methylcytidine-3'-phosphate
  modified_base 11: mod_base = OTHER; note = 2'-O-methyladenosine-3'-phosphate
  modified_base 12: mod_base = OTHER; note = 2'-O-methylguanosine-3'-phosphate
  modified_base 13: mod_base = OTHER; note = 2'-O-methyluridine-3'-phosphate
  modified_base 14: mod_base = OTHER; note = 2'-deoxy-2'-fluoroadenosine-3'-phosphate
  modified_base 15: mod_base = OTHER; note = 2'-O-methylguanosine-3'-phosphate
  modified_base 16: mod_base = OTHER; note = 2'-deoxy-2'-fluorouridine-3'-phosphate
  modified_base 17: mod_base = OTHER; note = 2'-O-methyladenosine-3'-phosphate
  modified_base 18: mod_base = OTHER; note = 2'-O-methyluridine-3'-phosphate
  modified_base 19: mod_base = OTHER; note = 2'-O-methyladenosine-3'-phosphate
  modified_base 20: mod_base = OTHER; note = 2'-O-methylguanosine-3'-phosphate
  modified_base 21: mod_base = OTHER; note = 2'-O-methylcytidine-3'-phosphate
  modified_base 22: mod_base = OTHER; note = 2'-O-methyladenosine-3'-phosphate
  modified_base 23: mod_base = OTHER; note = 2'-O-methylcytidine
tttctggatcagtagtatagcac

SEQ ID NO: 4671 - RNA, 23 nt, synthetic construct
  source 1..23: mol_type = other RNA
  modified_base 1: mod_base = OTHER; note = 2'-O-methyluridine-3'-phosphate 5'phosphate
  modified_base 2: mod_base = OTHER; note = 2'-deoxy-2'-fluorouridine-3'-phosphate
  modified_base 3: mod_base = OTHER; note = 2'-O-methyluridine-3'-phosphate
  modified_base 4: mod_base = OTHER; note = 2'-O-methyluridine-3'-phosphate
  modified_base 5: mod_base = OTHER; note = 2'-O-methylcytidine-3'-phosphate
  modified_base 6: mod_base = OTHER; note = 2'-deoxy-2'-fluorouridine-3'-phosphate
  modified_base 7: mod_base = OTHER; note = 2'-O-methylguanosine-3'-phosphate
  modified_base 8: mod_base = OTHER; note = 2'-O-methylguanosine-3'-phosphate
  modified_base 9: mod_base = OTHER; note = 2'-O-methyladenosine-3'-phosphate
  modified_base 10: mod_base = OTHER; note = 2'-O-methyluridine-3'-phosphate
  modified_base 11: mod_base = OTHER; note = 2'-O-methylcytidine-3'-phosphate
  modified_base 12: mod_base = OTHER; note = 2'-O-methyladenosine-3'-phosphate
  modified_base 13: mod_base = OTHER; note = 2'-O-methylguanosine-3'-phosphate
  modified_base 14: mod_base = OTHER; note = 2'-deoxy-2'-fluorouridine-3'-phosphate
  modified_base 15: mod_base = OTHER; note = 2'-O-methyladenosine-3'-phosphate
  modified_base 16: mod_base = OTHER; note = 2'-deoxy-2'-fluoroguanosine-3'-phosphate
  modified_base 17: mod_base = OTHER; note = 2'-O-methyluridine-3'-phosphate
  modified_base 18: mod_base = OTHER; note = 2'-O-methyladenosine-3'-phosphate
  modified_base 19: mod_base = OTHER; note = 2'-O-methyluridine-3'-phosphate
  modified_base 20: mod_base = OTHER; note = 2'-O-methyladenosine-3'-phosphate
  modified_base 21: mod_base = OTHER; note = 2'-O-methylguanosine-3'-phosphate
  modified_base 22: mod_base = OTHER; note = 2'-O-methylcytidine-3'-phosphate
  modified_base 23: mod_base = OTHER; note = 2'-O-methyladenosine
ttttctggatcagtagtatagca

SEQ ID NO: 4672 - RNA, 23 nt, synthetic construct
  source 1..23: mol_type = other RNA
  modified_base 1: mod_base = OTHER; note = 2'-O-methyluridine-3'-phosphate 5'phosphate
  modified_base 2: mod_base = OTHER; note = 2'-deoxy-2'-fluorouridine-3'-phosphate
  modified_base 3: mod_base = OTHER; note = 2'-O-methyluridine-3'-phosphate
  modified_base 4: mod_base = OTHER; note = 2'-O-methyluridine-3'-phosphate
  modified_base 5: mod_base = OTHER; note = 2'-O-methyluridine-3'-phosphate
  modified_base 6: mod_base = OTHER; note = 2'-deoxy-2'-fluorocytidine-3'-phosphate
  modified_base 7: mod_base = OTHER; note = 2'-O-methyluridine-3'-phosphate
  modified_base 8: mod_base = OTHER; note = 2'-O-methylguanosine-3'-phosphate
  modified_base 9: mod_base = OTHER; note = 2'-O-methylguanosine-3'-phosphate
  modified_base 10: mod_base = OTHER; note = 2'-O-methyladenosine-3'-phosphate
  modified_base 11: mod_base = OTHER; note = 2'-O-methyluridine-3'-phosphate
  modified_base 12: mod_base = OTHER; note = 2'-O-methylcytidine-3'-phosphate
  modified_base 13: mod_base = OTHER; note = 2'-O-methyladenosine-3'-phosphate
  modified_base 14: mod_base = OTHER; note = 2'-deoxy-2'-fluoroguanosine-3'-phosphate
  modified_base 15: mod_base = OTHER; note = 2'-O-methyluridine-3'-phosphate
  modified_base 16: mod_base = OTHER; note = 2'-deoxy-2'-fluoroadenosine-3'-phosphate
  modified_base 17: mod_base = OTHER; note = 2'-O-methylguanosine-3'-phosphate
  modified_base 18: mod_base = OTHER; note = 2'-O-methyluridine-3'-phosphate
  modified_base 19: mod_base = OTHER; note = 2'-O-methyladenosine-3'-phosphate
  modified_base 20: mod_base = OTHER; note = 2'-O-methyluridine-3'-phosphate
  modified_base 21: mod_base = OTHER; note = 2'-O-methyladenosine-3'-phosphate
  modified_base 22: mod_base = OTHER; note = 2'-O-methylguanosine-3'-phosphate
  modified_base 23: mod_base = OTHER; note = 2'-O-methylcytidine
tttttctggatcagtagtatagc

SEQ ID NO: 4673 - RNA, 23 nt, synthetic construct
  source 1..23: mol_type = other RNA
  modified_base 1: mod_base = OTHER; note = 2'-O-methyluridine-3'-phosphate 5'phosphate
  modified_base 2: mod_base = OTHER; note = 2'-deoxy-2'-fluorocytidine-3'-phosphate
  modified_base 3: mod_base = OTHER; note = 2'-O-methyluridine-3'-phosphate
  modified_base 4: mod_base = OTHER; note = 2'-O-methyluridine-3'-phosphate
  modified_base 5: mod_base = OTHER; note = 2'-O-methyluridine-3'-phosphate
  modified_base 6: mod_base = OTHER; note = 2'-deoxy-2'-fluorouridine-3'-phosphate
  modified_base 7: mod_base = OTHER; note = 2'-O-methylcytidine-3'-phosphate
  modified_base 8: mod_base = OTHER; note = 2'-O-methyluridine-3'-phosphate
  modified_base 9: mod_base = OTHER; note = 2'-O-methylguanosine-3'-phosphate
  modified_base 10: mod_base = OTHER; note = 2'-O-methylguanosine-3'-phosphate
  modified_base 11: mod_base = OTHER; note = 2'-O-methyladenosine-3'-phosphate
  modified_base 12: mod_base = OTHER; note = 2'-O-methyluridine-3'-phosphate
  modified_base 13: mod_base = OTHER; note = 2'-O-methylcytidine-3'-phosphate
  modified_base 14: mod_base = OTHER; note = 2'-deoxy-2'-fluoroadenosine-3'-phosphate
  modified_base 15: mod_base = OTHER; note = 2'-O-methylguanosine-3'-phosphate
  modified_base 16: mod_base = OTHER; note = 2'-deoxy-2'-fluorouridine-3'-phosphate
  modified_base 17: mod_base = OTHER; note = 2'-O-methyladenosine-3'-phosphate
  modified_base 18: mod_base = OTHER; note = 2'-O-methylguanosine-3'-phosphate
  modified_base 19: mod_base = OTHER; note = 2'-O-methyluridine-3'-phosphate
  modified_base 20: mod_base = OTHER; note = 2'-O-methyladenosine-3'-phosphate
  modified_base 21: mod_base = OTHER; note = 2'-O-methyluridine-3'-phosphate
  modified_base 22: mod_base = OTHER; note = 2'-O-methyladenosine-3'-phosphate
  modified_base 23: mod_base = OTHER; note = 2'-O-methylguanosine
tcttttctggatcagtagtatag

SEQ ID NO: 4674 - RNA, 23 nt, synthetic construct
  source 1..23: mol_type = other RNA
  modified_base 1: mod_base = OTHER; note = 2'-O-methyluridine-3'-phosphate 5'phosphate
  modified_base 2: mod_base = OTHER; note = 2'-deoxy-2'-fluorouridine-3'-phosphate
  modified_base 3: mod_base = OTHER; note = 2'-O-methylcytidine-3'-phosphate
  modified_base 4: mod_base = OTHER; note = 2'-O-methyluridine-3'-phosphate
  modified_base 5: mod_base = OTHER; note = 2'-O-methyluridine-3'-phosphate
  modified_base 6: mod_base = OTHER; note = 2'-deoxy-2'-fluorouridine-3'-phosphate
  modified_base 7: mod_base = OTHER; note = 2'-O-methyluridine-3'-phosphate
  modified_base 8: mod_base = OTHER; note = 2'-O-methylcytidine-3'-phosphate
  modified_base 9: mod_base = OTHER; note = 2'-O-methyluridine-3'-phosphate
  modified_base 10: mod_base = OTHER; note = 2'-O-methylguanosine-3'-phosphate
  modified_base 11: mod_base = OTHER; note = 2'-O-methylguanosine-3'-phosphate
  modified_base 12: mod_base = OTHER; note = 2'-O-methyladenosine-3'-phosphate
  modified_base 13: mod_base = OTHER; note = 2'-O-methyluridine-3'-phosphate
  modified_base 14: mod_base = OTHER; note = 2'-deoxy-2'-fluorocytidine-3'-phosphate
  modified_base 15: mod_base = OTHER; note = 2'-O-methyladenosine-3'-phosphate
  modified_base 16: mod_base = OTHER; note = 2'-deoxy-2'-fluoroguanosine-3'-phosphate
  modified_base 17: mod_base = OTHER; note = 2'-O-methyluridine-3'-phosphate
  modified_base 18: mod_base = OTHER; note = 2'-O-methyladenosine-3'-phosphate
  modified_base 19: mod_base = OTHER; note = 2'-O-methylguanosine-3'-phosphate
  modified_base 20: mod_base = OTHER; note = 2'-O-methyluridine-3'-phosphate
  modified_base 21: mod_base = OTHER; note = 2'-O-methyladenosine-3'-phosphate
  modified_base 22: mod_base = OTHER; note = 2'-O-methyluridine-3'-phosphate
  modified_base 23: mod_base = OTHER; note = 2'-O-methyladenosine
ttcttttctggatcagtagtata

SEQ ID NO: 4675 - RNA, 23 nt, synthetic construct
  source 1..23: mol_type = other RNA
  modified_base 1: mod_base = OTHER; note = 2'-O-methyluridine-3'-phosphate 5'phosphate
  modified_base 2: mod_base = OTHER; note = 2'-deoxy-2'-fluorocytidine-3'-phosphate
  modified_base 3: mod_base = OTHER; note = 2'-O-methyluridine-3'-phosphate
  modified_base 4: mod_base = OTHER; note = 2'-O-methylcytidine-3'-phosphate
  modified_base 5: mod_base = OTHER; note = 2'-O-methyluridine-3'-phosphate
  modified_base 6: mod_base = OTHER; note = 2'-deoxy-2'-fluorouridine-3'-phosphate
  modified_base 7: mod_base = OTHER; note = 2'-O-methyluridine-3'-phosphate
  modified_base 8: mod_base = OTHER; note = 2'-O-methyluridine-3'-phosphate
  modified_base 9: mod_base = OTHER; note = 2'-O-methylcytidine-3'-phosphate
  modified_base 10: mod_base = OTHER; note = 2'-O-methyluridine-3'-phosphate
  modified_base 11: mod_base = OTHER; note = 2'-O-methylguanosine-3'-phosphate
  modified_base 12: mod_base = OTHER; note = 2'-O-methylguanosine-3'-phosphate
  modified_base 13: mod_base = OTHER; note = 2'-O-methyladenosine-3'-phosphate
  modified_base 14: mod_base = OTHER; note = 2'-deoxy-2'-fluorouridine-3'-phosphate
  modified_base 15: mod_base = OTHER; note = 2'-O-methylcytidine-3'-phosphate
  modified_base 16: mod_base = OTHER; note = 2'-deoxy-2'-fluoroadenosine-3'-phosphate
  modified_base 17: mod_base = OTHER; note = 2'-O-methylguanosine-3'-phosphate
  modified_base 18: mod_base = OTHER; note = 2'-O-methyluridine-3'-phosphate
  modified_base 19: mod_base = OTHER; note = 2'-O-methyladenosine-3'-phosphate
  modified_base 20: mod_base = OTHER; note = 2'-O-methylguanosine-3'-phosphate
  modified_base 21: mod_base = OTHER; note = 2'-O-methyluridine-3'-phosphate
  modified_base 22: mod_base = OTHER; note = 2'-O-methyladenosine-3'-phosphate
  modified_base 23: mod_base = OTHER; note = 2'-O-methyluridine
tctcttttctggatcagtagtat

SEQ ID NO: 4676 - RNA, 23 nt, synthetic construct
  source 1..23: mol_type = other RNA
  modified_base 1: mod_base = OTHER; note = 2'-O-methyluridine-3'-phosphate 5'phosphate
  modified_base 2: mod_base = OTHER; note = 2'-deoxy-2'-fluorouridine-3'-phosphate
  modified_base 3: mod_base = OTHER; note = 2'-O-methylcytidine-3'-phosphate
  modified_base 4: mod_base = OTHER; note = 2'-O-methyluridine-3'-phosphate
  modified_base 5: mod_base = OTHER; note = 2'-O-methylcytidine-3'-phosphate
  modified_base 6: mod_base = OTHER; note = 2'-deoxy-2'-fluorouridine-3'-phosphate
  modified_base 7: mod_base = OTHER; note = 2'-O-methyluridine-3'-phosphate
  modified_base 8: mod_base = OTHER; note = 2'-O-methyluridine-3'-phosphate
  modified_base 9: mod_base = OTHER; note = 2'-O-methyluridine-3'-phosphate
  modified_base 10: mod_base = OTHER; note = 2'-O-methylcytidine-3'-phosphate
  modified_base 11: mod_base = OTHER; note = 2'-O-methyluridine-3'-phosphate
  modified_base 12: mod_base = OTHER; note = 2'-O-methylguanosine-3'-phosphate
  modified_base 13: mod_base = OTHER; note = 2'-O-methylguanosine-3'-phosphate
  modified_base 14: mod_base = OTHER; note = 2'-deoxy-2'-fluoroadenosine-3'-phosphate
  modified_base 15: mod_base = OTHER; note = 2'-O-methyluridine-3'-phosphate
  modified_base 16: mod_base = OTHER; note = 2'-deoxy-2'-fluorocytidine-3'-phosphate
  modified_base 17: mod_base = OTHER; note = 2'-O-methyladenosine-3'-phosphate
  modified_base 18: mod_base = OTHER; note = 2'-O-methylguanosine-3'-phosphate
  modified_base 19: mod_base = OTHER; note = 2'-O-methyluridine-3'-phosphate
  modified_base 20: mod_base = OTHER; note = 2'-O-methyladenosine-3'-phosphate
  modified_base 21: mod_base = OTHER; note = 2'-O-methylguanosine-3'-phosphate
  modified_base 22: mod_base = OTHER; note = 2'-O-methyluridine-3'-phosphate
  modified_base 23: mod_base = OTHER; note = 2'-O-methyladenosine
ttctcttttctggatcagtagta

SEQ ID NO: 4677 - RNA, 23 nt, synthetic construct
  source 1..23: mol_type = other RNA
  modified_base 1: mod_base = OTHER; note = 2'-O-methyluridine-3'-phosphate 5'phosphate
  modified_base 2: mod_base = OTHER; note = 2'-deoxy-2'-fluoroadenosine-3'-phosphate
  modified_base 3: mod_base = OTHER; note = 2'-O-methyluridine-3'-phosphate
  modified_base 4: mod_base = OTHER; note = 2'-O-methylcytidine-3'-phosphate
  modified_base 5: mod_base = OTHER; note = 2'-O-methyluridine-3'-phosphate
  modified_base 6: mod_base = OTHER; note = 2'-deoxy-2'-fluorocytidine-3'-phosphate
  modified_base 7: mod_base = OTHER; note = 2'-O-methyluridine-3'-phosphate
  modified_base 8: mod_base = OTHER; note = 2'-O-methyluridine-3'-phosphate
  modified_base 9: mod_base = OTHER; note = 2'-O-methyluridine-3'-phosphate
  modified_base 10: mod_base = OTHER; note = 2'-O-methyluridine-3'-phosphate
  modified_base 11: mod_base = OTHER; note = 2'-O-methylcytidine-3'-phosphate
  modified_base 12: mod_base = OTHER; note = 2'-O-methyluridine-3'-phosphate
  modified_base 13: mod_base = OTHER; note = 2'-O-methylguanosine-3'-phosphate
  modified_base 14: mod_base = OTHER; note = 2'-deoxy-2'-fluoroguanosine-3'-phosphate
  modified_base 15: mod_base = OTHER; note = 2'-O-methyladenosine-3'-phosphate
  modified_base 16: mod_base = OTHER; note = 2'-deoxy-2'-fluorouridine-3'-phosphate
  modified_base 17: mod_base = OTHER; note = 2'-O-methylcytidine-3'-phosphate
  modified_base 18: mod_base = OTHER; note = 2'-O-methyladenosine-3'-phosphate
  modified_base 19: mod_base = OTHER; note = 2'-O-methylguanosine-3'-phosphate
  modified_base 20: mod_base = OTHER; note = 2'-O-methyluridine-3'-phosphate
  modified_base 21: mod_base = OTHER; note = 2'-O-methyladenosine-3'-phosphate
  modified_base 22: mod_base = OTHER; note = 2'-O-methylguanosine-3'-phosphate
  modified_base 23: mod_base = OTHER; note = 2'-O-methyluridine
tatctcttttctggatcagtagt

SEQ ID NO: 4678 - RNA, 23 nt, synthetic construct
  source 1..23: mol_type = other RNA
  modified_base 1: mod_base = OTHER; note = 2'-O-methyluridine-3'-phosphate 5'phosphate
  modified_base 2: mod_base = OTHER; note = 2'-deoxy-2'-fluorouridine-3'-phosphate
  modified_base 3: mod_base = OTHER; note = 2'-O-methyladenosine-3'-phosphate
  modified_base 4: mod_base = OTHER; note = 2'-O-methyluridine-3'-phosphate
  modified_base 5: mod_base = OTHER; note = 2'-O-methylcytidine-3'-phosphate
  modified_base 6: mod_base = OTHER; note = 2'-deoxy-2'-fluorouridine-3'-phosphate
  modified_base 7: mod_base = OTHER; note = 2'-O-methylcytidine-3'-phosphate
  modified_base 8: mod_base = OTHER; note = 2'-O-methyluridine-3'-phosphate
  modified_base 9: mod_base = OTHER; note = 2'-O-methyluridine-3'-phosphate
  modified_base 10: mod_base = OTHER; note = 2'-O-methyluridine-3'-phosphate
  modified_base 11: mod_base = OTHER; note = 2'-O-methyluridine-3'-phosphate
  modified_base 12: mod_base = OTHER; note = 2'-O-methylcytidine-3'-phosphate
  modified_base 13: mod_base = OTHER; note = 2'-O-methyluridine-3'-phosphate
  modified_base 14: mod_base = OTHER; note = 2'-deoxy-2'-fluoroguanosine-3'-phosphate
  modified_base 15: mod_base = OTHER; note = 2'-O-methylguanosine-3'-phosphate
  modified_base 16: mod_base = OTHER; note = 2'-deoxy-2'-fluoroadenosine-3'-phosphate
  modified_base 17: mod_base = OTHER; note = 2'-O-methyluridine-3'-phosphate
  modified_base 18: mod_base = OTHER; note = 2'-O-methylcytidine-3'-phosphate
  modified_base 19: mod_base = OTHER; note = 2'-O-methyladenosine-3'-phosphate
  modified_base 20: mod_base = OTHER; note = 2'-O-methylguanosine-3'-phosphate
  modified_base 21: mod_base = OTHER; note = 2'-O-methyluridine-3'-phosphate
  modified_base 22: mod_base = OTHER; note = 2'-O-methyladenosine-3'-phosphate
  modified_base 23: mod_base = OTHER; note = 2'-O-methylguanosine
ttatctcttttctggatcagtag

SEQ ID NO: 4679 - RNA, 23 nt, synthetic construct
  source 1..23: mol_type = other RNA
  modified_base 1: mod_base = OTHER; note = 2'-O-methyluridine-3'-phosphate 5'phosphate
  modified_base 2: mod_base = OTHER; note = 2'-deoxy-2'-fluoroadenosine-3'-phosphate
  modified_base 3: mod_base = OTHER; note = 2'-O-methyluridine-3'-phosphate
  modified_base 4: mod_base = OTHER; note = 2'-O-methyladenosine-3'-phosphate
  modified_base 5: mod_base = OTHER; note = 2'-O-methyluridine-3'-phosphate
  modified_base 6: mod_base = OTHER; note = 2'-deoxy-2'-fluorocytidine-3'-phosphate
  modified_base 7: mod_base = OTHER; note = 2'-O-methyluridine-3'-phosphate
  modified_base 8: mod_base = OTHER; note = 2'-O-methylcytidine-3'-phosphate
  modified_base 9: mod_base = OTHER; note = 2'-O-methyluridine-3'-phosphate
  modified_base 10: mod_base = OTHER; note = 2'-O-methyluridine-3'-phosphate
  modified_base 11: mod_base = OTHER; note = 2'-O-methyluridine-3'-phosphate
  modified_base 12: mod_base = OTHER; note = 2'-O-methyluridine-3'-phosphate
  modified_base 13: mod_base = OTHER; note = 2'-O-methylcytidine-3'-phosphate
  modified_base 14: mod_base = OTHER; note = 2'-deoxy-2'-fluorouridine-3'-phosphate
  modified_base 15: mod_base = OTHER; note = 2'-O-methylguanosine-3'-phosphate
  modified_base 16: mod_base = OTHER; note = 2'-deoxy-2'-fluoroguanosine-3'-phosphate
  modified_base 17: mod_base = OTHER; note = 2'-O-methyladenosine-3'-phosphate
  modified_base 18: mod_base = OTHER; note = 2'-O-methyluridine-3'-phosphate
  modified_base 19: mod_base = OTHER; note = 2'-O-methylcytidine-3'-phosphate
  modified_base 20: mod_base = OTHER; note = 2'-O-methyladenosine-3'-phosphate
  modified_base 21: mod_base = OTHER; note = 2'-O-methylguanosine-3'-phosphate
  modified_base 22: mod_base = OTHER; note = 2'-O-methyluridine-3'-phosphate
  modified_base 23: mod_base = OTHER; note = 2'-O-methyladenosine
tatatctcttttctggatcagta

SEQ ID NO: 4680 - RNA, 23 nt, synthetic construct
  source 1..23: mol_type = other RNA
  modified_base 1: mod_base = OTHER; note = 2'-O-methyluridine-3'-phosphate 5'phosphate
  modified_base 2: mod_base = OTHER; note = 2'-deoxy-2'-fluorocytidine-3'-phosphate
  modified_base 3: mod_base = OTHER; note = 2'-O-methyladenosine-3'-phosphate
  modified_base 4: mod_base = OTHER; note = 2'-O-methyluridine-3'-phosphate
  modified_base 5: mod_base = OTHER; note = 2'-O-methyladenosine-3'-phosphate
  modified_base 6: mod_base = OTHER; note = 2'-deoxy-2'-fluorouridine-3'-phosphate
  modified_base 7: mod_base = OTHER; note = 2'-O-methylcytidine-3'-phosphate
  modified_base 8: mod_base = OTHER; note = 2'-O-methyluridine-3'-phosphate
  modified_base 9: mod_base = OTHER; note = 2'-O-methylcytidine-3'-phosphate
  modified_base 10: mod_base = OTHER; note = 2'-O-methyluridine-3'-phosphate
  modified_base 11: mod_base = OTHER; note = 2'-O-methyluridine-3'-phosphate
  modified_base 12: mod_base = OTHER; note = 2'-O-methyluridine-3'-phosphate
  modified_base 13: mod_base = OTHER; note = 2'-O-methyluridine-3'-phosphate
  modified_base 14: mod_base = OTHER; note = 2'-deoxy-2'-fluorocytidine-3'-phosphate
  modified_base 15: mod_base = OTHER; note = 2'-O-methyluridine-3'-phosphate
  modified_base 16: mod_base = OTHER; note = 2'-deoxy-2'-fluoroguanosine-3'-phosphate
  modified_base 17: mod_base = OTHER; note = 2'-O-methylguanosine-3'-phosphate
  modified_base 18: mod_base = OTHER; note = 2'-O-methyladenosine-3'-phosphate
  modified_base 19: mod_base = OTHER; note = 2'-O-methyluridine-3'-phosphate
  modified_base 20: mod_base = OTHER; note = 2'-O-methylcytidine-3'-phosphate
  modified_base 21: mod_base = OTHER; note = 2'-O-methyladenosine-3'-phosphate
  modified_base 22: mod_base = OTHER; note = 2'-O-methylguanosine-3'-phosphate
  modified_base 23: mod_base = OTHER; note = 2'-O-methyluridine
tcatatctcttttctggatcagt

SEQ ID NO: 4681 - RNA, 23 nt, synthetic construct
  source 1..23: mol_type = other RNA
  modified_base 1: mod_base = OTHER; note = 2'-O-methyluridine-3'-phosphate 5'phosphate
  modified_base 2: mod_base = OTHER; note = 2'-deoxy-2'-fluorouridine-3'-phosphate
  modified_base 3: mod_base = OTHER; note = 2'-O-methylcytidine-3'-phosphate
  modified_base 4: mod_base = OTHER; note = 2'-O-methyladenosine-3'-phosphate
  modified_base 5: mod_base = OTHER; note = 2'-O-methyluridine-3'-phosphate
  modified_base 6: mod_base = OTHER; note = 2'-deoxy-2'-fluoroadenosine-3'-phosphate
  modified_base 7: mod_base = OTHER; note = 2'-O-methyluridine-3'-phosphate
  modified_base 8: mod_base = OTHER; note = 2'-O-methylcytidine-3'-phosphate
  modified_base 9: mod_base = OTHER; note = 2'-O-methyluridine-3'-phosphate
  modified_base 10: mod_base = OTHER; note = 2'-O-methylcytidine-3'-phosphate
  modified_base 11: mod_base = OTHER; note = 2'-O-methyluridine-3'-phosphate
  modified_base 12: mod_base = OTHER; note = 2'-O-methyluridine-3'-phosphate
  modified_base 13: mod_base = OTHER; note = 2'-O-methyluridine-3'-phosphate
  modified_base 14: mod_base = OTHER; note = 2'-deoxy-2'-fluorouridine-3'-phosphate
  modified_base 15: mod_base = OTHER; note = 2'-O-methylcytidine-3'-phosphate
  modified_base 16: mod_base = OTHER; note = 2'-deoxy-2'-fluorouridine-3'-phosphate
  modified_base 17: mod_base = OTHER; note = 2'-O-methylguanosine-3'-phosphate
  modified_base 18: mod_base = OTHER; note = 2'-O-methylguanosine-3'-phosphate
  modified_base 19: mod_base = OTHER; note = 2'-O-methyladenosine-3'-phosphate
  modified_base 20: mod_base = OTHER; note = 2'-O-methyluridine-3'-phosphate
  modified_base 21: mod_base = OTHER; note = 2'-O-methylcytidine-3'-phosphate
  modified_base 22: mod_base = OTHER; note = 2'-O-methyladenosine-3'-phosphate
  modified_base 23: mod_base = OTHER; note = 2'-O-methylguanosine
ttcatatctcttttctggatcag

SEQ ID NO: 4682 - RNA, 23 nt, synthetic construct
  source 1..23: mol_type = other RNA
  modified_base 1: mod_base = OTHER; note = 2'-O-methyluridine-3'-phosphate 5'phosphate
  modified_base 2: mod_base = OTHER; note = 2'-deoxy-2'-fluoroguanosine-3'-phosphate
  modified_base 3: mod_base = OTHER; note = 2'-O-methyluridine-3'-phosphate
  modified_base 4: mod_base = OTHER; note = 2'-O-methylcytidine-3'-phosphate
  modified_base 5: mod_base = OTHER; note = 2'-O-methyladenosine-3'-phosphate
  modified_base 6: mod_base = OTHER; note = 2'-deoxy-2'-fluorouridine-3'-phosphate
  modified_base 7: mod_base = OTHER; note = 2'-O-methyladenosine-3'-phosphate
  modified_base 8: mod_base = OTHER; note = 2'-O-methyluridine-3'-phosphate
  modified_base 9: mod_base = OTHER; note = 2'-O-methylcytidine-3'-phosphate
  modified_base 10: mod_base = OTHER; note = 2'-O-methyluridine-3'-phosphate
  modified_base 11: mod_base = OTHER; note = 2'-O-methylcytidine-3'-phosphate
  modified_base 12: mod_base = OTHER; note = 2'-O-methyluridine-3'-phosphate
  modified_base 13: mod_base = OTHER; note = 2'-O-methyluridine-3'-phosphate
  modified_base 14: mod_base = OTHER; note = 2'-deoxy-2'-fluorouridine-3'-phosphate
  modified_base 15: mod_base = OTHER; note = 2'-O-methyluridine-3'-phosphate
  modified_base 16: mod_base = OTHER; note = 2'-deoxy-2'-fluorocytidine-3'-phosphate
  modified_base 17: mod_base = OTHER; note = 2'-O-methyluridine-3'-phosphate
  modified_base 18: mod_base = OTHER; note = 2'-O-methylguanosine-3'-phosphate
  modified_base 19: mod_base = OTHER; note = 2'-O-methylguanosine-3'-phosphate
  modified_base 20: mod_base = OTHER; note = 2'-O-methyladenosine-3'-phosphate
  modified_base 21: mod_base = OTHER; note = 2'-O-methyluridine-3'-phosphate
  modified_base 22: mod_base = OTHER; note = 2'-O-methylcytidine-3'-phosphate
  modified_base 23: mod_base = OTHER; note = 2'-O-methyladenosine
tgtcatatctcttttctggatca

SEQ ID NO: 4683 - RNA, 23 nt, synthetic construct
  source 1..23: mol_type = other RNA
  modified_base 1: mod_base = OTHER; note = 2'-O-methyluridine-3'-phosphate 5'phosphate
  modified_base 2: mod_base = OTHER; note = 2'-deoxy-2'-fluoroadenosine-3'-phosphate
  modified_base 3: mod_base = OTHER; note = 2'-O-methylguanosine-3'-phosphate
  modified_base 4: mod_base = OTHER; note = 2'-O-methyluridine-3'-phosphate
  modified_base 5: mod_base = OTHER; note = 2'-O-methylcytidine-3'-phosphate
  modified_base 6: mod_base = OTHER; note = 2'-deoxy-2'-fluoroadenosine-3'-phosphate
  modified_base 7: mod_base = OTHER; note = 2'-O-methyluridine-3'-phosphate
  modified_base 8: mod_base = OTHER; note = 2'-O-methyladenosine-3'-phosphate
  modified_base 9: mod_base = OTHER; note = 2'-O-methyluridine-3'-phosphate
  modified_base 10: mod_base = OTHER; note = 2'-O-methylcytidine-3'-phosphate
  modified_base 11: mod_base = OTHER; note = 2'-O-methyluridine-3'-phosphate
  modified_base 12: mod_base = OTHER; note = 2'-O-methylcytidine-3'-phosphate
  modified_base 13: mod_base = OTHER; note = 2'-O-methyluridine-3'-phosphate
  modified_base 14: mod_base = OTHER; note = 2'-deoxy-2'-fluorouridine-3'-phosphate
  modified_base 15: mod_base = OTHER; note = 2'-O-methyluridine-3'-phosphate
  modified_base 16: mod_base = OTHER; note = 2'-deoxy-2'-fluorouridine-3'-phosphate
  modified_base 17: mod_base = OTHER; note = 2'-O-methylcytidine-3'-phosphate
  modified_base 18: mod_base = OTHER; note = 2'-O-methyluridine-3'-phosphate
  modified_base 19: mod_base = OTHER; note = 2'-O-methylguanosine-3'-phosphate
  modified_base 20: mod_base = OTHER; note = 2'-O-methylguanosine-3'-phosphate
  modified_base 21: mod_base = OTHER; note = 2'-O-methyladenosine-3'-phosphate
  modified_base 22: mod_base = OTHER; note = 2'-O-methyluridine-3'-phosphate
  modified_base 23: mod_base = OTHER; note = 2'-O-methylcytidine
tagtcatatctcttttctggatc

SEQ ID NO: 4684 - RNA, 23 nt, synthetic construct
  source 1..23: mol_type = other RNA
  modified_base 1: mod_base = OTHER; note = 2'-O-methyluridine-3'-phosphate 5'phosphate
  modified_base 2: mod_base = OTHER; note = 2'-deoxy-2'-fluorouridine-3'-phosphate
  modified_base 3: mod_base = OTHER; note = 2'-O-methyladenosine-3'-phosphate
  modified_base 4: mod_base = OTHER; note = 2'-O-methylguanosine-3'-phosphate
  modified_base 5: mod_base = OTHER; note = 2'-O-methyluridine-3'-phosphate
  modified_base 6: mod_base = OTHER; note = 2'-deoxy-2'-fluorocytidine-3'-phosphate
  modified_base 7: mod_base = OTHER; note = 2'-O-methyladenosine-3'-phosphate
  modified_base 8: mod_base = OTHER; note = 2'-O-methyluridine-3'-phosphate
  modified_base 9: mod_base = OTHER; note = 2'-O-methyladenosine-3'-phosphate
  modified_base 10: mod_base = OTHER; note = 2'-O-methyluridine-3'-phosphate
  modified_base 11: mod_base = OTHER; note = 2'-O-methylcytidine-3'-phosphate
  modified_base 12: mod_base = OTHER; note = 2'-O-methyluridine-3'-phosphate
  modified_base 13: mod_base = OTHER; note = 2'-O-methylcytidine-3'-phosphate
  modified_base 14: mod_base = OTHER; note = 2'-deoxy-2'-fluorouridine-3'-phosphate
  modified_base 15: mod_base = OTHER; note = 2'-O-methyluridine-3'-phosphate
  modified_base 16: mod_base = OTHER; note = 2'-deoxy-2'-fluorouridine-3'-phosphate
  modified_base 17: mod_base = OTHER; note = 2'-O-methyluridine-3'-phosphate
  modified_base 18: mod_base = OTHER; note = 2'-O-methylcytidine-3'-phosphate
  modified_base 19: mod_base = OTHER; note = 2'-O-methyluridine-3'-phosphate
  modified_base 20: mod_base = OTHER; note = 2'-O-methylguanosine-3'-phosphate
  modified_base 21: mod_base = OTHER; note = 2'-O-methylguanosine-3'-phosphate
  modified_base 22: mod_base = OTHER; note = 2'-O-methyladenosine-3'-phosphate
  modified_base 23: mod_base = OTHER; note = 2'-O-methyluridine
ttagtcatatctcttttctggat

SEQ ID NO: 4685 - RNA, 23 nt, synthetic construct
  source 1..23: mol_type = other RNA
  modified_base 1: mod_base = OTHER; note = 2'-O-methyluridine-3'-phosphate 5'phosphate
  modified_base 2: mod_base = OTHER; note = 2'-deoxy-2'-fluoroguanosine-3'-phosphate
  modified_base 3: mod_base = OTHER; note = 2'-O-methyluridine-3'-phosphate
  modified_base 4: mod_base = OTHER; note = 2'-O-methyladenosine-3'-phosphate
  modified_base 5: mod_base = OTHER; note = 2'-O-methylguanosine-3'-phosphate
  modified_base 6: mod_base = OTHER; note = 2'-deoxy-2'-fluorouridine-3'-phosphate
  modified_base 7: mod_base = OTHER; note = 2'-O-methylcytidine-3'-phosphate
  modified_base 8: mod_base = OTHER; note = 2'-O-methyladenosine-3'-phosphate
  modified_base 9: mod_base = OTHER; note = 2'-O-methyluridine-3'-phosphate
  modified_base 10: mod_base = OTHER; note = 2'-O-methyladenosine-3'-phosphate
  modified_base 11: mod_base = OTHER; note = 2'-O-methyluridine-3'-phosphate
  modified_base 12: mod_base = OTHER; note = 2'-O-methylcytidine-3'-phosphate
  modified_base 13: mod_base = OTHER; note = 2'-O-methyluridine-3'-phosphate
  modified_base 14: mod_base = OTHER; note = 2'-deoxy-2'-fluorocytidine-3'-phosphate
  modified_base 15: mod_base = OTHER; note = 2'-O-methyluridine-3'-phosphate
  modified_base 16: mod_base = OTHER; note = 2'-deoxy-2'-fluorouridine-3'-phosphate
  modified_base 17: mod_base = OTHER; note = 2'-O-methyluridine-3'-phosphate
  modified_base 18: mod_base = OTHER; note = 2'-O-methyluridine-3'-phosphate
  modified_base 19: mod_base = OTHER; note = 2'-O-methylcytidine-3'-phosphate
  modified_base 20: mod_base = OTHER; note = 2'-O-methyluridine-3'-phosphate
  modified_base 21: mod_base = OTHER; note = 2'-O-methylguanosine-3'-phosphate
  modified_base 22: mod_base = OTHER; note = 2'-O-methylguanosine-3'-phosphate
  modified_base 23: mod_base = OTHER; note = 2'-O-methyladenosine
tgtagtcatatctcttttctgga

SEQ ID NO: 4686 - RNA, 23 nt, synthetic construct
  source 1..23: mol_type = other RNA
  modified_base 1: mod_base = OTHER; note = 2'-O-methyluridine-3'-phosphate 5'phosphate
  modified_base 2: mod_base = OTHER; note = 2'-deoxy-2'-fluoroadenosine-3'-phosphate
  modified_base 3: mod_base = OTHER; note = 2'-O-methylguanosine-3'-phosphate
  modified_base 4: mod_base = OTHER; note = 2'-O-methyluridine-3'-phosphate
  modified_base 5: mod_base = OTHER; note = 2'-O-methyladenosine-3'-phosphate
  modified_base 6: mod_base = OTHER; note = 2'-deoxy-2'-fluoroguanosine-3'-phosphate
  modified_base 7: mod_base = OTHER; note = 2'-O-methyluridine-3'-phosphate
  modified_base 8: mod_base = OTHER; note = 2'-O-methylcytidine-3'-phosphate
  modified_base 9: mod_base = OTHER; note = 2'-O-methyladenosine-3'-phosphate
  modified_base 10: mod_base = OTHER; note = 2'-O-methyluridine-3'-phosphate
  modified_base 11: mod_base = OTHER; note = 2'-O-methyladenosine-3'-phosphate
  modified_base 12: mod_base = OTHER; note = 2'-O-methyluridine-3'-phosphate
  modified_base 13: mod_base = OTHER; note = 2'-O-methylcytidine-3'-phosphate
  modified_base 14: mod_base = OTHER; note = 2'-deoxy-2'-fluorouridine-3'-phosphate
  modified_base 15: mod_base = OTHER; note = 2'-O-methylcytidine-3'-phosphate
  modified_base 16: mod_base = OTHER; note = 2'-deoxy-2'-fluorouridine-3'-phosphate
  modified_base 17: mod_base = OTHER; note = 2'-O-methyluridine-3'-phosphate
  modified_base 18: mod_base = OTHER; note = 2'-O-methyluridine-3'-phosphate
  modified_base 19: mod_base = OTHER; note = 2'-O-methyluridine-3'-phosphate
  modified_base 20: mod_base = OTHER; note = 2'-O-methylcytidine-3'-phosphate
  modified_base 21: mod_base = OTHER; note = 2'-O-methyluridine-3'-phosphate
  modified_base 22: mod_base = OTHER; note = 2'-O-methylguanosine-3'-phosphate
  modified_base 23: mod_base = OTHER; note = 2'-O-methylguanosine
tagtagtcatatctcttttctgg

SEQ ID NO: 4687 - RNA, 23 nt, synthetic construct
  source 1..23: mol_type = other RNA
  modified_base 1: mod_base = OTHER; note = 2'-O-methyluridine-3'-phosphate 5'phosphate
  modified_base 2: mod_base = OTHER; note = 2'-deoxy-2'-fluorocytidine-3'-phosphate
  modified_base 3: mod_base = OTHER; note = 2'-O-methyladenosine-3'-phosphate
  modified_base 4: mod_base = OTHER; note = 2'-O-methylguanosine-3'-phosphate
  modified_base 5: mod_base = OTHER; note = 2'-O-methyluridine-3'-phosphate
  modified_base 6: mod_base = OTHER; note = 2'-deoxy-2'-fluoroadenosine-3'-phosphate
  modified_base 7: mod_base = OTHER; note = 2'-O-methylguanosine-3'-phosphate
  modified_base 8: mod_base = OTHER; note = 2'-O-methyluridine-3'-phosphate
  modified_base 9: mod_base = OTHER; note = 2'-O-methylcytidine-3'-phosphate
  modified_base 10: mod_base = OTHER; note = 2'-O-methyladenosine-3'-phosphate
  modified_base 11: mod_base = OTHER; note = 2'-O-methyluridine-3'-phosphate
  modified_base 12: mod_base = OTHER; note = 2'-O-methyladenosine-3'-phosphate
  modified_base 13: mod_base = OTHER; note = 2'-O-methyluridine-3'-phosphate
  modified_base 14: mod_base = OTHER; note = 2'-deoxy-2'-fluorocytidine-3'-phosphate
  modified_base 15: mod_base = OTHER; note = 2'-O-methyluridine-3'-phosphate
  modified_base 16: mod_base = OTHER; note = 2'-deoxy-2'-fluorocytidine-3'-phosphate
  modified_base 17: mod_base = OTHER; note = 2'-O-methyluridine-3'-phosphate
  modified_base 18: mod_base = OTHER; note = 2'-O-methyluridine-3'-phosphate
  modified_base 19: mod_base = OTHER; note = 2'-O-methyluridine-3'-phosphate
  modified_base 20: mod_base = OTHER; note = 2'-O-methyluridine-3'-phosphate
  modified_base 21: mod_base = OTHER; note = 2'-O-methylcytidine-3'-phosphate
  modified_base 22: mod_base = OTHER; note = 2'-O-methyluridine-3'-phosphate
  modified_base 23: mod_base = OTHER; note = 2'-O-methylguanosine
tcagtagtcatatctcttttctg

SEQ ID NO: 4688 - RNA, 23 nt, synthetic construct
  source 1..23: mol_type = other RNA
  modified_base 1: mod_base = OTHER; note = 2'-O-methyluridine-3'-phosphate 5'phosphate
  modified_base 2: mod_base = OTHER; note = 2'-deoxy-2'-fluoroguanosine-3'-phosphate
  modified_base 3: mod_base = OTHER; note = 2'-O-methylcytidine-3'-phosphate
  modified_base 4: mod_base = OTHER; note = 2'-O-methyladenosine-3'-phosphate
  modified_base 5: mod_base = OTHER; note = 2'-O-methylguanosine-3'-phosphate
  modified_base 6: mod_base = OTHER; note = 2'-deoxy-2'-fluorouridine-3'-phosphate
  modified_base 7: mod_base = OTHER; note = 2'-O-methyladenosine-3'-phosphate
  modified_base 8: mod_base = OTHER; note = 2'-O-methylguanosine-3'-phosphate
  modified_base 9: mod_base = OTHER; note = 2'-O-methyluridine-3'-phosphate
  modified_base 10: mod_base = OTHER; note = 2'-O-methylcytidine-3'-phosphate
  modified_base 11: mod_base = OTHER; note = 2'-O-methyladenosine-3'-phosphate
  modified_base 12: mod_base = OTHER; note = 2'-O-methyluridine-3'-phosphate
  modified_base 13: mod_base = OTHER; note = 2'-O-methyladenosine-3'-phosphate
  modified_base 14: mod_base = OTHER; note = 2'-deoxy-2'-fluorouridine-3'-phosphate
  modified_base 15: mod_base = OTHER; note = 2'-O-methylcytidine-3'-phosphate
  modified_base 16: mod_base = OTHER; note = 2'-deoxy-2'-fluorouridine-3'-phosphate
  modified_base 17: mod_base = OTHER; note = 2'-O-methylcytidine-3'-phosphate
  modified_base 18: mod_base = OTHER; note = 2'-O-methyluridine-3'-phosphate
  modified_base 19: mod_base = OTHER; note = 2'-O-methyluridine-3'-phosphate
  modified_base 20: mod_base = OTHER; note = 2'-O-methyluridine-3'-phosphate
  modified_base 21: mod_base = OTHER; note = 2'-O-methyluridine-3'-phosphate
  modified_base 22: mod_base = OTHER; note = 2'-O-methylcytidine-3'-phosphate
  modified_base 23: mod_base = OTHER; note = 2'-O-methyluridine
tgcagtagtcatatctcttttct

SEQ ID NO: 4689 - RNA, 23 nt, synthetic construct
  source 1..23: mol_type = other RNA
  modified_base 1: mod_base = OTHER; note = 2'-O-methyluridine-3'-phosphate 5'phosphate
  modified_base 2: mod_base = OTHER; note = 2'-deoxy-2'-fluoroadenosine-3'-phosphate
  modified_base 3: mod_base = OTHER; note = 2'-O-methylguanosine-3'-phosphate
  modified_base 4: mod_base = OTHER; note = 2'-O-methyladenosine-3'-phosphate
  modified_base 5: mod_base = OTHER; note = 2'-O-methyladenosine-3'-phosphate
  modified_base 6: mod_base = OTHER; note = 2'-deoxy-2'-fluorouridine-3'-phosphate
  modified_base 7: mod_base = OTHER; note = 2'-O-methylguanosine-3'-phosphate
  modified_base 8: mod_base = OTHER; note = 2'-O-methyluridine-3'-phosphate
  modified_base 9: mod_base = OTHER; note = 2'-O-methylcytidine-3'-phosphate
  modified_base 10: mod_base = OTHER; note = 2'-O-methylguanosine-3'-phosphate
  modified_base 11: mod_base = OTHER; note = 2'-O-methylcytidine-3'-phosphate
  modified_base 12: mod_base = OTHER; note = 2'-O-methyladenosine-3'-phosphate
  modified_base 13: mod_base = OTHER; note = 2'-O-methylguanosine-3'-phosphate
  modified_base 14: mod_base = OTHER; note = 2'-deoxy-2'-fluorouridine-3'-phosphate
  modified_base 15: mod_base = OTHER; note = 2'-O-methyladenosine-3'-phosphate
  modified_base 16: mod_base = OTHER; note = 2'-deoxy-2'-fluoroguanosine-3'-phosphate
  modified_base 17: mod_base = OTHER; note = 2'-O-methyluridine-3'-phosphate
  modified_base 18: mod_base = OTHER; note = 2'-O-methylcytidine-3'-phosphate
  modified_base 19: mod_base = OTHER; note = 2'-O-methyladenosine-3'-phosphate
  modified_base 20: mod_base = OTHER; note = 2'-O-methyluridine-3'-phosphate
  modified_base 21: mod_base = OTHER; note = 2'-O-methyladenosine-3'-phosphate
  modified_base 22: mod_base = OTHER; note = 2'-O-methyluridine-3'-phosphate
  modified_base 23: mod_base = OTHER; note = 2'-O-methylcytidine
tagaatgtcgcagtagtcatatc

SEQ ID NO: 4690 - RNA, 23 nt, synthetic construct
  source 1..23: mol_type = other RNA
  modified_base 1: mod_base = OTHER; note = 2'-O-methyluridine-3'-phosphate 5'phosphate
  modified_base 2: mod_base = OTHER; note = 2'-deoxy-2'-fluoroadenosine-3'-phosphate
  modified_base 3: mod_base = OTHER; note = 2'-O-methyladenosine-3'-phosphate
  modified_base 4: mod_base = OTHER; note = 2'-O-methylguanosine-3'-phosphate
  modified_base 5: mod_base = OTHER; note = 2'-O-methyladenosine-3'-phosphate
  modified_base 6: mod_base = OTHER; note = 2'-deoxy-2'-fluoroadenosine-3'-phosphate
  modified_base 7: mod_base = OTHER; note = 2'-O-methyluridine-3'-phosphate
  modified_base 8: mod_base = OTHER; note = 2'-O-methylguanosine-3'-phosphate
  modified_base 9: mod_base = OTHER; note = 2'-O-methyluridine-3'-phosphate
  modified_base 10: mod_base = OTHER; note = 2'-O-methylcytidine-3'-phosphate
  modified_base 11: mod_base = OTHER; note = 2'-O-methylguanosine-3'-phosphate
  modified_base 12: mod_base = OTHER; note = 2'-O-methylcytidine-3'-phosphate
  modified_base 13: mod_base = OTHER; note = 2'-O-methyladenosine-3'-phosphate
  modified_base 14: mod_base = OTHER; note = 2'-deoxy-2'-fluoroguanosine-3'-phosphate
  modified_base 15: mod_base = OTHER; note = 2'-O-methyluridine-3'-phosphate
  modified_base 16: mod_base = OTHER; note = 2'-deoxy-2'-fluoroadenosine-3'-phosphate
  modified_base 17: mod_base = OTHER; note = 2'-O-methylguanosine-3'-phosphate
  modified_base 18: mod_base = OTHER; note = 2'-O-methyluridine-3'-phosphate
  modified_base 19: mod_base = OTHER; note = 2'-O-methylcytidine-3'-phosphate
  modified_base 20: mod_base = OTHER; note = 2'-O-methyladenosine-3'-phosphate
  modified_base 21: mod_base = OTHER; note = 2'-O-methyluridine-3'-phosphate
  modified_base 22: mod_base = OTHER; note = 2'-O-methyladenosine-3'-phosphate
  modified_base 23: mod_base = OTHER; note = 2'-O-methyluridine
taagaatgtcgcagtagtcatat

SEQ ID NO: 4691 - RNA, 23 nt, synthetic construct
  source 1..23: mol_type = other RNA
  modified_base 1: mod_base = OTHER; note = 2'-O-methyluridine-3'-phosphate 5'phosphate
  modified_base 2: mod_base = OTHER; note = 2'-deoxy-2'-fluorocytidine-3'-phosphate
  modified_base 3: mod_base = OTHER; note = 2'-O-methyladenosine-3'-phosphate
  modified_base 4: mod_base = OTHER; note = 2'-O-methyladenosine-3'-phosphate
  modified_base 5: mod_base = OTHER; note = 2'-O-methylguanosine-3'-phosphate
  modified_base 6: mod_base = OTHER; note = 2'-deoxy-2'-fluoroadenosine-3'-phosphate
  modified_base 7: mod_base = OTHER; note = 2'-O-methyladenosine-3'-phosphate
  modified_base 8: mod_base = OTHER; note = 2'-O-methyluridine-3'-phosphate
  modified_base 9: mod_base = OTHER; note = 2'-O-methylguanosine-3'-phosphate
  modified_base 10: mod_base = OTHER; note = 2'-O-methyluridine-3'-phosphate
  modified_base 11: mod_base = OTHER; note = 2'-O-methylcytidine-3'-phosphate
  modified_base 12: mod_base = OTHER; note = 2'-O-methylguanosine-3'-phosphate
  modified_base 13: mod_base = OTHER; note = 2'-O-methylcytidine-3'-phosphate
  modified_base 14: mod_base = OTHER; note = 2'-deoxy-2'-fluoroadenosine-3'-phosphate
  modified_base 15: mod_base = OTHER; note = 2'-O-methylguanosine-3'-phosphate
  modified_base 16: mod_base = OTHER; note = 2'-deoxy-2'-fluorouridine-3'-phosphate
  modified_base 17: mod_base = OTHER; note = 2'-O-methyladenosine-3'-phosphate
  modified_base 18: mod_base = OTHER; note = 2'-O-methylguanosine-3'-phosphate
  modified_base 19: mod_base = OTHER; note = 2'-O-methyluridine-3'-phosphate
  modified_base 20: mod_base = OTHER; note = 2'-O-methylcytidine-3'-phosphate
  modified_base 21: mod_base = OTHER; note = 2'-O-methyladenosine-3'-phosphate
  modified_base 22: mod_base = OTHER; note = 2'-O-methyluridine-3'-phosphate
  modified_base 23: mod_base = OTHER; note = 2'-O-methyladenosine
tcaagaatgtcgcagtagtcata

SEQ ID NO: 4692 - RNA, 23 nt, synthetic construct
  source 1..23: mol_type = other RNA
  modified_base 1: mod_base = OTHER; note = 2'-O-methyluridine-3'-phosphate 5'phosphate
  modified_base 2: mod_base = OTHER; note = 2'-deoxy-2'-fluorouridine-3'-phosphate
  modified_base 3: mod_base = OTHER; note = 2'-O-methylcytidine-3'-phosphate
  modified_base 4: mod_base = OTHER; note = 2'-O-methyladenosine-3'-phosphate
  modified_base 5: mod_base = OTHER; note = 2'-O-methyladenosine-3'-phosphate
  modified_base 6: mod_base = OTHER; note = 2'-deoxy-2'-fluoroguanosine-3'-phosphate
  modified_base 7: mod_base = OTHER; note = 2'-O-methyladenosine-3'-phosphate
  modified_base 8: mod_base = OTHER; note = 2'-O-methyladenosine-3'-phosphate
  modified_base 9: mod_base = OTHER; note = 2'-O-methyluridine-3'-phosphate
  modified_base 10: mod_base = OTHER; note = 2'-O-methylguanosine-3'-phosphate
  modified_base 11: mod_base = OTHER; note = 2'-O-methyluridine-3'-phosphate
  modified_base 12: mod_base = OTHER; note = 2'-O-methylcytidine-3'-phosphate
  modified_base 13: mod_base = OTHER; note = 2'-O-methylguanosine-3'-phosphate
  modified_base 14: mod_base = OTHER; note = 2'-deoxy-2'-fluorocytidine-3'-phosphate
  modified_base 15: mod_base = OTHER; note = 2'-O-methyladenosine-3'-phosphate
  modified_base 16: mod_base = OTHER; note = 2'-deoxy-2'-fluoroguanosine-3'-phosphate
  modified_base 17: mod_base = OTHER; note = 2'-O-methyluridine-3'-phosphate
  modified_base 18: mod_base = OTHER; note = 2'-O-methyladenosine-3'-phosphate
  modified_base 19: mod_base = OTHER; note = 2'-O-methylguanosine-3'-phosphate
  modified_base 20: mod_base = OTHER; note = 2'-O-methyluridine-3'-phosphate
  modified_base 21: mod_base = OTHER; note = 2'-O-methylcytidine-3'-phosphate
  modified_base 22: mod_base = OTHER; note = 2'-O-methyladenosine-3'-phosphate
  modified_base 23: mod_base = OTHER; note = 2'-O-methyluridine
ttcaagaatgtcgcagtagtcat

SEQ ID NO: 4693 - RNA, 23 nt, synthetic construct
  source 1..23: mol_type = other RNA
  modified_base 1: mod_base = OTHER; note = 2'-O-methyluridine-3'-phosphate 5'phosphate
  modified_base 2: mod_base = OTHER; note = 2'-deoxy-2'-fluoroadenosine-3'-phosphate
  modified_base 3: mod_base = OTHER; note = 2'-O-methylcytidine-3'-phosphate
  modified_base 4: mod_base = OTHER; note = 2'-O-methyluridine-3'-phosphate
  modified_base 5: mod_base = OTHER; note = 2'-O-methylcytidine-3'-phosphate
  modified_base 6: mod_base = OTHER; note = 2'-deoxy-2'-fluoroadenosine-3'-phosphate
  modified_base 7: mod_base = OTHER; note = 2'-O-methyladenosine-3'-phosphate
  modified_base 8: mod_base = OTHER; note = 2'-O-methylguanosine-3'-phosphate
  modified_base 9: mod_base = OTHER; note = 2'-O-methyladenosine-3'-phosphate
  modified_base 10: mod_base = OTHER; note = 2'-O-methyladenosine-3'-phosphate
  modified_base 11: mod_base = OTHER; note = 2'-O-methyluridine-3'-phosphate
  modified_base 12: mod_base = OTHER; note = 2'-O-methylguanosine-3'-phosphate
  modified_base 13: mod_base = OTHER; note = 2'-O-methyluridine-3'-phosphate
  modified_base 14: mod_base = OTHER; note = 2'-deoxy-2'-fluorocytidine-3'-phosphate
  modified_base 15: mod_base = OTHER; note = 2'-O-methylguanosine-3'-phosphate
  modified_base 16: mod_base = OTHER; note = 2'-deoxy-2'-fluorocytidine-3'-phosphate
  modified_base 17: mod_base = OTHER; note = 2'-O-methyladenosine-3'-phosphate
  modified_base 18: mod_base = OTHER; note = 2'-O-methylguanosine-3'-phosphate
  modified_base 19: mod_base = OTHER; note = 2'-O-methyluridine-3'-phosphate
  modified_base 20: mod_base = OTHER; note = 2'-O-methyladenosine-3'-phosphate
  modified_base 21: mod_base = OTHER; note = 2'-O-methylguanosine-3'-phosphate
  modified_base 22: mod_base = OTHER; note = 2'-O-methyluridine-3'-phosphate
  modified_base 23: mod_base = OTHER; note = 2'-O-methylcytidine
tactcaagaatgtcgcagtagtc

SEQ ID NO: 4694 - RNA, 23 nt, synthetic construct
  source 1..23: mol_type = other RNA
  modified_base 1: mod_base = OTHER; note = 2'-O-methyluridine-3'-phosphate 5'phosphate
  modified_base 2: mod_base = OTHER; note = 2'-deoxy-2'-fluorocytidine-3'-phosphate
  modified_base 3: mod_base = OTHER; note = 2'-O-methyladenosine-3'-phosphate
  modified_base 4: mod_base = OTHER; note = 2'-O-methylcytidine-3'-phosphate
  modified_base 5: mod_base = OTHER; note = 2'-O-methyluridine-3'-phosphate
  modified_base 6: mod_base = OTHER; note = 2'-deoxy-2'-fluorocytidine-3'-phosphate
  modified_base 7: mod_base = OTHER; note = 2'-O-methyladenosine-3'-phosphate
  modified_base 8: mod_base = OTHER; note = 2'-O-methyladenosine-3'-phosphate
  modified_base 9: mod_base = OTHER; note = 2'-O-methylguanosine-3'-phosphate
  modified_base 10: mod_base = OTHER; note = 2'-O-methyladenosine-3'-phosphate
  modified_base 11: mod_base = OTHER; note = 2'-O-methyladenosine-3'-phosphate
  modified_base 12: mod_base = OTHER; note = 2'-O-methyluridine-3'-phosphate
  modified_base 13: mod_base = OTHER; note = 2'-O-methylguanosine-3'-phosphate
  modified_base 14: mod_base = OTHER; note = 2'-deoxy-2'-fluorouridine-3'-phosphate
  modified_base 15: mod_base = OTHER; note = 2'-O-methylcytidine-3'-phosphate
  modified_base 16: mod_base = OTHER; note = 2'-deoxy-2'-fluoroguanosine-3'-phosphate
  modified_base 17: mod_base = OTHER; note = 2'-O-methylcytidine-3'-phosphate
  modified_base 18: mod_base = OTHER; note = 2'-O-methyladenosine-3'-phosphate
  modified_base 19: mod_base = OTHER; note = 2'-O-methylguanosine-3'-phosphate
  modified_base 20: mod_base = OTHER; note = 2'-O-methyluridine-3'-phosphate
  modified_base 21: mod_base = OTHER; note = 2'-O-methyladenosine-3'-phosphate
  modified_base 22: mod_base = OTHER; note = 2'-O-methylguanosine-3'-phosphate
  modified_base 23: mod_base = OTHER; note = 2'-O-methyluridine
tcactcaagaatgtcgcagtagt

SEQ ID NO: 4695 - RNA, 23 nt, synthetic construct
  source 1..23: mol_type = other RNA
  modified_base 1: mod_base = OTHER; note = 2'-O-methyluridine-3'-phosphate 5'phosphate
  modified_base 2: mod_base = OTHER; note = 2'-deoxy-2'-fluoroadenosine-3'-phosphate
  modified_base 3: mod_base = OTHER; note = 2'-O-methylcytidine-3'-phosphate
  modified_base 4: mod_base = OTHER; note = 2'-O-methyladenosine-3'-phosphate
  modified_base 5: mod_base = OTHER; note = 2'-O-methylcytidine-3'-phosphate
  modified_base 6: mod_base = OTHER; note = 2'-deoxy-2'-fluorouridine-3'-phosphate
  modified_base 7: mod_base = OTHER; note = 2'-O-methylcytidine-3'-phosphate
  modified_base 8: mod_base = OTHER; note = 2'-O-methyladenosine-3'-phosphate
  modified_base 9: mod_base = OTHER; note = 2'-O-methyladenosine-3'-phosphate
  modified_base 10: mod_base = OTHER; note = 2'-O-methylguanosine-3'-phosphate
  modified_base 11: mod_base = OTHER; note = 2'-O-methyladenosine-3'-phosphate
  modified_base 12: mod_base = OTHER; note = 2'-O-methyladenosine-3'-phosphate
  modified_base 13: mod_base = OTHER; note = 2'-O-methyluridine-3'-phosphate
  modified_base 14: mod_base = OTHER; note = 2'-deoxy-2'-fluoroguanosine-3'-phosphate
  modified_base 15: mod_base = OTHER; note = 2'-O-methyluridine-3'-phosphate
  modified_base 16: mod_base = OTHER; note = 2'-deoxy-2'-fluorocytidine-3'-phosphate
  modified_base 17: mod_base = OTHER; note = 2'-O-methylguanosine-3'-phosphate
  modified_base 18: mod_base = OTHER; note = 2'-O-methylcytidine-3'-phosphate
  modified_base 19: mod_base = OTHER; note = 2'-O-methyladenosine-3'-phosphate
  modified_base 20: mod_base = OTHER; note = 2'-O-methylguanosine-3'-phosphate
  modified_base 21: mod_base = OTHER; note = 2'-O-methyluridine-3'-phosphate
  modified_base 22: mod_base = OTHER; note = 2'-O-methyladenosine-3'-phosphate
  modified_base 23: mod_base = OTHER; note = 2'-O-methylguanosine
tacactcaagaatgtcgcagtag

SEQ ID NO: 4696 - RNA, 23 nt, synthetic construct
  source 1..23: mol_type = other RNA
  modified_base 1: mod_base = OTHER; note = 2'-O-methyluridine-3'-phosphate 5'phosphate
  modified_base 2: mod_base = OTHER; note = 2'-deoxy-2'-fluorocytidine-3'-phosphate
  modified_base 3: mod_base = OTHER; note = 2'-O-methyladenosine-3'-phosphate
  modified_base 4: mod_base = OTHER; note = 2'-O-methylcytidine-3'-phosphate
  modified_base 5: mod_base = OTHER; note = 2'-O-methyladenosine-3'-phosphate
  modified_base 6: mod_base = OTHER; note = 2'-deoxy-2'-fluorocytidine-3'-phosphate
  modified_base 7: mod_base = OTHER; note = 2'-O-methyluridine-3'-phosphate
  modified_base 8: mod_base = OTHER; note = 2'-O-methylcytidine-3'-phosphate
  modified_base 9: mod_base = OTHER; note = 2'-O-methyladenosine-3'-phosphate
  modified_base 10: mod_base = OTHER; note = 2'-O-methyladenosine-3'-phosphate
  modified_base 11: mod_base = OTHER; note = 2'-O-methylguanosine-3'-phosphate
  modified_base 12: mod_base = OTHER; note = 2'-O-methyladenosine-3'-phosphate
  modified_base 13: mod_base = OTHER; note = 2'-O-methyladenosine-3'-phosphate
  modified_base 14: mod_base = OTHER; note = 2'-deoxy-2'-fluorouridine-3'-phosphate
  modified_base 15: mod_base = OTHER; note = 2'-O-methylguanosine-3'-phosphate
  modified_base 16: mod_base = OTHER; note = 2'-deoxy-2'-fluorouridine-3'-phosphate
  modified_base 17: mod_base = OTHER; note = 2'-O-methylcytidine-3'-phosphate
  modified_base 18: mod_base = OTHER; note = 2'-O-methylguanosine-3'-phosphate
  modified_base 19: mod_base = OTHER; note = 2'-O-methylcytidine-3'-phosphate
  modified_base 20: mod_base = OTHER; note = 2'-O-methyladenosine-3'-phosphate
  modified_base 21: mod_base = OTHER; note = 2'-O-methylguanosine-3'-phosphate
  modified_base 22: mod_base = OTHER; note = 2'-O-methyluridine-3'-phosphate
  modified_base 23: mod_base = OTHER; note = 2'-O-methyladenosine
tcacactcaagaatgtcgcagta

SEQ ID NO: 4697 - RNA, 23 nt, synthetic construct
  source 1..23: mol_type = other RNA
  modified_base 1: mod_base = OTHER; note = 2'-O-methyluridine-3'-phosphate 5'phosphate
  modified_base 2: mod_base = OTHER; note = 2'-deoxy-2'-fluorouridine-3'-phosphate
  modified_base 3: mod_base = OTHER; note = 2'-O-methylcytidine-3'-phosphate
  modified_base 4: mod_base = OTHER; note = 2'-O-methyladenosine-3'-phosphate
  modified_base 5: mod_base = OTHER; note = 2'-O-methylcytidine-3'-phosphate
  modified_base 6: mod_base = OTHER; note = 2'-deoxy-2'-fluoroadenosine-3'-phosphate
  modified_base 7: mod_base = OTHER; note = 2'-O-methylcytidine-3'-phosphate
  modified_base 8: mod_base = OTHER; note = 2'-O-methyluridine-3'-phosphate
  modified_base 9: mod_base = OTHER; note = 2'-O-methylcytidine-3'-phosphate
  modified_base 10: mod_base = OTHER; note = 2'-O-methyladenosine-3'-phosphate
  modified_base 11: mod_base = OTHER; note = 2'-O-methyladenosine-3'-phosphate
  modified_base 12: mod_base = OTHER; note = 2'-O-methylguanosine-3'-phosphate
  modified_base 13: mod_base = OTHER; note = 2'-O-methyladenosine-3'-phosphate
  modified_base 14: mod_base = OTHER; note = 2'-deoxy-2'-fluoroadenosine-3'-phosphate
  modified_base 15: mod_base = OTHER; note = 2'-O-methyluridine-3'-phosphate
  modified_base 16: mod_base = OTHER; note = 2'-deoxy-2'-fluoroguanosine-3'-phosphate
  modified_base 17: mod_base = OTHER; note = 2'-O-methyluridine-3'-phosphate
  modified_base 18: mod_base = OTHER; note = 2'-O-methylcytidine-3'-phosphate
  modified_base 19: mod_base = OTHER; note = 2'-O-methylguanosine-3'-phosphate
  modified_base 20: mod_base = OTHER; note = 2'-O-methylcytidine-3'-phosphate
  modified_base 21: mod_base = OTHER; note = 2'-O-methyladenosine-3'-phosphate
  modified_base 22: mod_base = OTHER; note = 2'-O-methylguanosine-3'-phosphate
  modified_base 23: mod_base = OTHER; note = 2'-O-methyluridine
ttcacactcaagaatgtcgcagt

SEQ ID NO: 4698 - RNA, 23 nt, synthetic construct
  source 1..23: mol_type = other RNA
  modified_base 1: mod_base = OTHER; note = 2'-O-methyluridine-3'-phosphate 5'phosphate
  modified_base 2: mod_base = OTHER; note = 2'-deoxy-2'-fluorouridine-3'-phosphate
  modified_base 3: mod_base = OTHER; note = 2'-O-methyluridine-3'-phosphate
  modified_base 4: mod_base = OTHER; note = 2'-O-methylcytidine-3'-phosphate
  modified_base 5: mod_base = OTHER; note = 2'-O-methyladenosine-3'-phosphate
  modified_base 6: mod_base = OTHER; note = 2'-deoxy-2'-fluorocytidine-3'-phosphate
  modified_base 7: mod_base = OTHER; note = 2'-O-methyladenosine-3'-phosphate
  modified_base 8: mod_base = OTHER; note = 2'-O-methylcytidine-3'-phosphate
  modified_base 9: mod_base = OTHER; note = 2'-O-methyluridine-3'-phosphate
  modified_base 10: mod_base = OTHER; note = 2'-O-methylcytidine-3'-phosphate
  modified_base 11: mod_base = OTHER; note = 2'-O-methyladenosine-3'-phosphate
  modified_base 12: mod_base = OTHER; note = 2'-O-methyladenosine-3'-phosphate
  modified_base 13: mod_base = OTHER; note = 2'-O-methylguanosine-3'-phosphate
  modified_base 14: mod_base = OTHER; note = 2'-deoxy-2'-fluoroadenosine-3'-phosphate
  modified_base 15: mod_base = OTHER; note = 2'-O-methyladenosine-3'-phosphate
  modified_base 16: mod_base = OTHER; note = 2'-deoxy-2'-fluorouridine-3'-phosphate
  modified_base 17: mod_base = OTHER; note = 2'-O-methylguanosine-3'-phosphate
  modified_base 18: mod_base = OTHER; note = 2'-O-methyluridine-3'-phosphate
  modified_base 19: mod_base = OTHER; note = 2'-O-methylcytidine-3'-phosphate
  modified_base 20: mod_base = OTHER; note = 2'-O-methylguanosine-3'-phosphate
  modified_base 21: mod_base = OTHER; note = 2'-O-methylcytidine-3'-phosphate
  modified_base 22: mod_base = OTHER; note = 2'-O-methyladenosine-3'-phosphate
  modified_base 23: mod_base = OTHER; note = 2'-O-methylguanosine
tttcacactcaagaatgtcgcag

SEQ ID NO: 4699 - RNA, 23 nt, synthetic construct
  source 1..23: mol_type = other RNA
  modified_base 1: mod_base = OTHER; note = 2'-O-methyluridine-3'-phosphate 5'phosphate
  modified_base 2: mod_base = OTHER; note = 2'-deoxy-2'-fluorocytidine-3'-phosphate
  modified_base 3: mod_base = OTHER; note = 2'-O-methyluridine-3'-phosphate
  modified_base 4: mod_base = OTHER; note = 2'-O-methyluridine-3'-phosphate
  modified_base 5: mod_base = OTHER; note = 2'-O-methylcytidine-3'-phosphate
  modified_base 6: mod_base = OTHER; note = 2'-deoxy-2'-fluoroadenosine-3'-phosphate
  modified_base 7: mod_base = OTHER; note = 2'-O-methylcytidine-3'-phosphate
  modified_base 8: mod_base = OTHER; note = 2'-O-methyladenosine-3'-phosphate
  modified_base 9: mod_base = OTHER; note = 2'-O-methylcytidine-3'-phosphate
  modified_base 10: mod_base = OTHER; note = 2'-O-methyluridine-3'-phosphate
  modified_base 11: mod_base = OTHER; note = 2'-O-methylcytidine-3'-phosphate
  modified_base 12: mod_base = OTHER; note = 2'-O-methyladenosine-3'-phosphate
  modified_base 13: mod_base = OTHER; note = 2'-O-methyladenosine-3'-phosphate
  modified_base 14: mod_base = OTHER; note = 2'-deoxy-2'-fluoroguanosine-3'-phosphate
  modified_base 15: mod_base = OTHER; note = 2'-O-methyladenosine-3'-phosphate
  modified_base 16: mod_base = OTHER; note = 2'-deoxy-2'-fluoroadenosine-3'-phosphate
  modified_base 17: mod_base = OTHER; note = 2'-O-methyluridine-3'-phosphate
  modified_base 18: mod_base = OTHER; note = 2'-O-methylguanosine-3'-phosphate
  modified_base 19: mod_base = OTHER; note = 2'-O-methyluridine-3'-phosphate
  modified_base 20: mod_base = OTHER; note = 2'-O-methylcytidine-3'-phosphate
  modified_base 21: mod_base = OTHER; note = 2'-O-methylguanosine-3'-phosphate
  modified_base 22: mod_base = OTHER; note = 2'-O-methylcytidine-3'-phosphate
  modified_base 23: mod_base = OTHER; note = 2'-O-methyladenosine
tcttcacactcaagaatgtcgca

SEQ ID NO: 4700 - RNA, 23 nt, synthetic construct
  source 1..23: mol_type = other RNA
  modified_base 1: mod_base = OTHER; note = 2'-O-methyluridine-3'-phosphate 5'phosphate
  modified_base 2: mod_base = OTHER; note = 2'-deoxy-2'-fluorouridine-3'-phosphate
  modified_base 3: mod_base = OTHER; note = 2'-O-methylcytidine-3'-phosphate
  modified_base 4: mod_base = OTHER; note = 2'-O-methyluridine-3'-phosphate
  modified_base 5: mod_base = OTHER; note = 2'-O-methyluridine-3'-phosphate
  modified_base 6: mod_base = OTHER; note = 2'-deoxy-2'-fluorocytidine-3'-phosphate
  modified_base 7: mod_base = OTHER; note = 2'-O-methyladenosine-3'-phosphate
  modified_base 8: mod_base = OTHER; note = 2'-O-methylcytidine-3'-phosphate
  modified_base 9: mod_base = OTHER; note = 2'-O-methyladenosine-3'-phosphate
  modified_base 10: mod_base = OTHER; note = 2'-O-methylcytidine-3'-phosphate
  modified_base 11: mod_base = OTHER; note = 2'-O-methyluridine-3'-phosphate
  modified_base 12: mod_base = OTHER; note = 2'-O-methylcytidine-3'-phosphate
  modified_base 13: mod_base = OTHER; note = 2'-O-methyladenosine-3'-phosphate
  modified_base 14: mod_base = OTHER; note = 2'-deoxy-2'-fluoroadenosine-3'-phosphate
  modified_base 15: mod_base = OTHER; note = 2'-O-methylguanosine-3'-phosphate
  modified_base 16: mod_base = OTHER; note = 2'-deoxy-2'-fluoroadenosine-3'-phosphate
  modified_base 17: mod_base = OTHER; note = 2'-O-methyladenosine-3'-phosphate
  modified_base 18: mod_base = OTHER; note = 2'-O-methyluridine-3'-phosphate
  modified_base 19: mod_base = OTHER; note = 2'-O-methylguanosine-3'-phosphate
  modified_base 20: mod_base = OTHER; note = 2'-O-methyluridine-3'-phosphate
  modified_base 21: mod_base = OTHER; note = 2'-O-methylcytidine-3'-phosphate
  modified_base 22: mod_base = OTHER; note = 2'-O-methylguanosine-3'-phosphate
  modified_base 23: mod_base = OTHER; note = 2'-O-methylcytidine
ttcttcacactcaagaatgtcgc

SEQ ID NO: 4701 - RNA, 23 nt, synthetic construct
  source 1..23: mol_type = other RNA
  modified_base 1: mod_base = OTHER; note = 2'-O-methyluridine-3'-phosphate 5'phosphate
  modified_base 2: mod_base = OTHER; note = 2'-deoxy-2'-fluorocytidine-3'-phosphate
  modified_base 3: mod_base = OTHER; note = 2'-O-methyluridine-3'-phosphate
  modified_base 4: mod_base = OTHER; note = 2'-O-methylcytidine-3'-phosphate
  modified_base 5: mod_base = OTHER; note = 2'-O-methyluridine-3'-phosphate
  modified_base 6: mod_base = OTHER; note = 2'-deoxy-2'-fluorouridine-3'-phosphate
  modified_base 7: mod_base = OTHER; note = 2'-O-methylcytidine-3'-phosphate
  modified_base 8: mod_base = OTHER; note = 2'-O-methyladenosine-3'-phosphate
  modified_base 9: mod_base = OTHER; note = 2'-O-methylcytidine-3'-phosphate
  modified_base 10: mod_base = OTHER; note = 2'-O-methyladenosine-3'-phosphate
  modified_base 11: mod_base = OTHER; note = 2'-O-methylcytidine-3'-phosphate
  modified_base 12: mod_base = OTHER; note = 2'-O-methyluridine-3'-phosphate
  modified_base 13: mod_base = OTHER; note = 2'-O-methylcytidine-3'-phosphate
  modified_base 14: mod_base = OTHER; note = 2'-deoxy-2'-fluoroadenosine-3'-phosphate
  modified_base 15: mod_base = OTHER; note = 2'-O-methyladenosine-3'-phosphate
  modified_base 16: mod_base = OTHER; note = 2'-deoxy-2'-fluoroguanosine-3'-phosphate
  modified_base 17: mod_base = OTHER; note = 2'-O-methyladenosine-3'-phosphate
  modified_base 18: mod_base = OTHER; note = 2'-O-methyladenosine-3'-phosphate
  modified_base 19: mod_base = OTHER; note = 2'-O-methyluridine-3'-phosphate
  modified_base 20: mod_base = OTHER; note = 2'-O-methylguanosine-3'-phosphate
  modified_base 21: mod_base = OTHER; note = 2'-O-methyluridine-3'-phosphate
  modified_base 22: mod_base = OTHER; note = 2'-O-methylcytidine-3'-phosphate
  modified_base 23: mod_base = OTHER; note = 2'-O-methylguanosine
tctcttcacactcaagaatgtcg

SEQ ID NO: 4702 - RNA, 23 nt, synthetic construct
  source 1..23: mol_type = other RNA
  modified_base 1: mod_base = OTHER; note = 2'-O-methyluridine-3'-phosphate 5'phosphate
  modified_base 2: mod_base = OTHER; note = 2'-deoxy-2'-fluorouridine-3'-phosphate
  modified_base 3: mod_base = OTHER; note = 2'-O-methylcytidine-3'-phosphate
  modified_base 4: mod_base = OTHER; note = 2'-O-methylcytidine-3'-phosphate
  modified_base 5: mod_base = OTHER; note = 2'-O-methyluridine-3'-phosphate
  modified_base 6: mod_base = OTHER; note = 2'-deoxy-2'-fluorocytidine-3'-phosphate
  modified_base 7: mod_base = OTHER; note = 2'-O-methyluridine-3'-phosphate
  modified_base 8: mod_base = OTHER; note = 2'-O-methyluridine-3'-phosphate
  modified_base 9: mod_base = OTHER; note = 2'-O-methylcytidine-3'-phosphate
  modified_base 10: mod_base = OTHER; note = 2'-O-methyladenosine-3'-phosphate
  modified_base 11: mod_base = OTHER; note = 2'-O-methylcytidine-3'-phosphate
  modified_base 12: mod_base = OTHER; note = 2'-O-methyladenosine-3'-phosphate
  modified_base 13: mod_base = OTHER; note = 2'-O-methylcytidine-3'-phosphate
  modified_base 14: mod_base = OTHER; note = 2'-deoxy-2'-fluorouridine-3'-phosphate
  modified_base 15: mod_base = OTHER; note = 2'-O-methylcytidine-3'-phosphate
  modified_base 16: mod_base = OTHER; note = 2'-deoxy-2'-fluoroadenosine-3'-phosphate
  modified_base 17: mod_base = OTHER; note = 2'-O-methyladenosine-3'-phosphate
  modified_base 18: mod_base = OTHER; note = 2'-O-methylguanosine-3'-phosphate
  modified_base 19: mod_base = OTHER; note = 2'-O-methyladenosine-3'-phosphate
  modified_base 20: mod_base = OTHER; note = 2'-O-methyladenosine-3'-phosphate
  modified_base 21: mod_base = OTHER; note = 2'-O-methyluridine-3'-phosphate
  modified_base 22: mod_base = OTHER; note = 2'-O-methylguanosine-3'-phosphate
  modified_base 23: mod_base = OTHER; note = 2'-O-methyluridine
ttcctcttcacactcaagaatgt

SEQ ID NO: 4703 - RNA, 23 nt, synthetic construct
  source 1..23: mol_type = other RNA
  modified_base 1: mod_base = OTHER; note = 2'-O-methyluridine-3'-phosphate 5'phosphate
  modified_base 2: mod_base = OTHER; note = 2'-deoxy-2'-fluorouridine-3'-phosphate
  modified_base 3: mod_base = OTHER; note = 2'-O-methyluridine-3'-phosphate
  modified_base 4: mod_base = OTHER; note = 2'-O-methylcytidine-3'-phosphate
  modified_base 5: mod_base = OTHER; note = 2'-O-methylcytidine-3'-phosphate
  modified_base 6: mod_base = OTHER; note = 2'-deoxy-2'-fluorouridine-3'-phosphate
  modified_base 7: mod_base = OTHER; note = 2'-O-methylcytidine-3'-phosphate
  modified_base 8: mod_base = OTHER; note = 2'-O-methyluridine-3'-phosphate
  modified_base 9: mod_base = OTHER; note = 2'-O-methyluridine-3'-phosphate
  modified_base 10: mod_base = OTHER; note = 2'-O-methylcytidine-3'-phosphate
  modified_base 11: mod_base = OTHER; note = 2'-O-methyladenosine-3'-phosphate
  modified_base 12: mod_base = OTHER; note = 2'-O-methylcytidine-3'-phosphate
  modified_base 13: mod_base = OTHER; note = 2'-O-methyladenosine-3'-phosphate
  modified_base 14: mod_base = OTHER; note = 2'-deoxy-2'-fluorocytidine-3'-phosphate
  modified_base 15: mod_base = OTHER; note = 2'-O-methyluridine-3'-phosphate
  modified_base 16: mod_base = OTHER; note = 2'-deoxy-2'-fluorocytidine-3'-phosphate
  modified_base 17: mod_base = OTHER; note = 2'-O-methyladenosine-3'-phosphate
  modified_base 18: mod_base = OTHER; note = 2'-O-methyladenosine-3'-phosphate
  modified_base 19: mod_base = OTHER; note = 2'-O-methylguanosine-3'-phosphate
  modified_base 20: mod_base = OTHER; note = 2'-O-methyladenosine-3'-phosphate
  modified_base 21: mod_base = OTHER; note = 2'-O-methyladenosine-3'-phosphate
  modified_base 22: mod_base = OTHER; note = 2'-O-methyluridine-3'-phosphate
  modified_base 23: mod_base = OTHER; note = 2'-O-methylguanosine
tttcctcttcacactcaagaatg

SEQ ID NO: 4704 - RNA, 23 nt, synthetic construct
  source 1..23: mol_type = other RNA
  modified_base 1: mod_base = OTHER; note = 2'-O-methyluridine-3'-phosphate 5'phosphate
  modified_base 2: mod_base = OTHER; note = 2'-deoxy-2'-fluoroadenosine-3'-phosphate
  modified_base 3: mod_base = OTHER; note = 2'-O-methyluridine-3'-phosphate
  modified_base 4: mod_base = OTHER; note = 2'-O-methyluridine-3'-phosphate
  modified_base 5: mod_base = OTHER; note = 2'-O-methylcytidine-3'-phosphate
  modified_base 6: mod_base = OTHER; note = 2'-deoxy-2'-fluorocytidine-3'-phosphate
  modified_base 7: mod_base = OTHER; note = 2'-O-methyluridine-3'-phosphate
  modified_base 8: mod_base = OTHER; note = 2'-O-methylcytidine-3'-phosphate
  modified_base 9: mod_base = OTHER; note = 2'-O-methyluridine-3'-phosphate
  modified_base 10: mod_base = OTHER; note = 2'-O-methyluridine-3'-phosphate
  modified_base 11: mod_base = OTHER; note = 2'-O-methylcytidine-3'-phosphate
  modified_base 12: mod_base = OTHER; note = 2'-O-methyladenosine-3'-phosphate
  modified_base 13: mod_base = OTHER; note = 2'-O-methylcytidine-3'-phosphate
  modified_base 14: mod_base = OTHER; note = 2'-deoxy-2'-fluoroadenosine-3'-phosphate
  modified_base 15: mod_base = OTHER; note = 2'-O-methylcytidine-3'-phosphate
  modified_base 16: mod_base = OTHER; note = 2'-deoxy-2'-fluorouridine-3'-phosphate
  modified_base 17: mod_base = OTHER; note = 2'-O-methylcytidine-3'-phosphate
  modified_base 18: mod_base = OTHER; note = 2'-O-methyladenosine-3'-phosphate
  modified_base 19: mod_base = OTHER; note = 2'-O-methyladenosine-3'-phosphate
  modified_base 20: mod_base = OTHER; note = 2'-O-methylguanosine-3'-phosphate
  modified_base 21: mod_base = OTHER; note = 2'-O-methyladenosine-3'-phosphate
  modified_base 22: mod_base = OTHER; note = 2'-O-methyladenosine-3'-phosphate
  modified_base 23: mod_base = OTHER; note = 2'-O-methyluridine
tattcctcttcacactcaagaat

SEQ ID NO: 4705 - RNA, 23 nt, synthetic construct
  source 1..23: mol_type = other RNA
  modified_base 1: mod_base = OTHER; note = 2'-O-methyluridine-3'-phosphate 5'phosphate
  modified_base 2: mod_base = OTHER; note = 2'-deoxy-2'-fluorocytidine-3'-phosphate
  modified_base 3: mod_base = OTHER; note = 2'-O-methyladenosine-3'-phosphate
  modified_base 4: mod_base = OTHER; note = 2'-O-methyluridine-3'-phosphate
  modified_base 5: mod_base = OTHER; note = 2'-O-methyluridine-3'-phosphate
  modified_base 6: mod_base = OTHER; note = 2'-deoxy-2'-fluorocytidine-3'-phosphate
  modified_base 7: mod_base = OTHER; note = 2'-O-methylcytidine-3'-phosphate
  modified_base 8: mod_base = OTHER; note = 2'-O-methyluridine-3'-phosphate
  modified_base 9: mod_base = OTHER; note = 2'-O-methylcytidine-3'-phosphate
  modified_base 10: mod_base = OTHER; note = 2'-O-methyluridine-3'-phosphate
  modified_base 11: mod_base = OTHER; note = 2'-O-methyluridine-3'-phosphate
  modified_base 12: mod_base = OTHER; note = 2'-O-methylcytidine-3'-phosphate
  modified_base 13: mod_base = OTHER; note = 2'-O-methyladenosine-3'-phosphate
  modified_base 14: mod_base = OTHER; note = 2'-deoxy-2'-fluorocytidine-3'-phosphate
  modified_base 15: mod_base = OTHER; note = 2'-O-methyladenosine-3'-phosphate
  modified_base 16: mod_base = OTHER; note = 2'-deoxy-2'-fluorocytidine-3'-phosphate
  modified_base 17: mod_base = OTHER; note = 2'-O-methyluridine-3'-phosphate
  modified_base 18: mod_base = OTHER; note = 2'-O-methylcytidine-3'-phosphate
  modified_base 19: mod_base = OTHER; note = 2'-O-methyladenosine-3'-phosphate
  modified_base 20: mod_base = OTHER; note = 2'-O-methyladenosine-3'-phosphate
  modified_base 21: mod_base = OTHER; note = 2'-O-methylguanosine-3'-phosphate
  modified_base 22: mod_base = OTHER; note = 2'-O-methyladenosine-3'-phosphate
  modified_base 23: mod_base = OTHER; note = 2'-O-methyladenosine
tcattcctcttcacactcaagaa

SEQ ID NO: 4706 - RNA, 23 nt, synthetic construct
  source 1..23: mol_type = other RNA
  modified_base 1: mod_base = OTHER; note = 2'-O-methyluridine-3'-phosphate 5'phosphate
  modified_base 2: mod_base = OTHER; note = 2'-deoxy-2'-fluoroadenosine-3'-phosphate
  modified_base 3: mod_base = OTHER; note = 2'-O-methylcytidine-3'-phosphate
  modified_base 4: mod_base = OTHER; note = 2'-O-methyladenosine-3'-phosphate
  modified_base 5: mod_base = OTHER; note = 2'-O-methyluridine-3'-phosphate
  modified_base 6: mod_base = OTHER; note = 2'-deoxy-2'-fluorouridine-3'-phosphate
  modified_base 7: mod_base = OTHER; note = 2'-O-methylcytidine-3'-phosphate
  modified_base 8: mod_base = OTHER; note = 2'-O-methylcytidine-3'-phosphate
  modified_base 9: mod_base = OTHER; note = 2'-O-methyluridine-3'-phosphate
  modified_base 10: mod_base = OTHER; note = 2'-O-methylcytidine-3'-phosphate
  modified_base 11: mod_base = OTHER; note = 2'-O-methyluridine-3'-phosphate
  modified_base 12: mod_base = OTHER; note = 2'-O-methyluridine-3'-phosphate
  modified_base 13: mod_base = OTHER; note = 2'-O-methylcytidine-3'-phosphate
  modified_base 14: mod_base = OTHER; note = 2'-deoxy-2'-fluoroadenosine-3'-phosphate
  modified_base 15: mod_base = OTHER; note = 2'-O-methylcytidine-3'-phosphate
  modified_base 16: mod_base = OTHER; note = 2'-deoxy-2'-fluoroadenosine-3'-phosphate
  modified_base 17: mod_base = OTHER; note = 2'-O-methylcytidine-3'-phosphate
  modified_base 18: mod_base = OTHER; note = 2'-O-methyluridine-3'-phosphate
  modified_base 19: mod_base = OTHER; note = 2'-O-methylcytidine-3'-phosphate
  modified_base 20: mod_base = OTHER; note = 2'-O-methyladenosine-3'-phosphate
  modified_base 21: mod_base = OTHER; note = 2'-O-methyladenosine-3'-phosphate
  modified_base 22: mod_base = OTHER; note = 2'-O-methylguanosine-3'-phosphate
  modified_base 23: mod_base = OTHER; note = 2'-O-methyladenosine
tacattcctcttcacactcaaga

SEQ ID NO: 4707 - RNA, 23 nt, synthetic construct
  source 1..23: mol_type = other RNA
  modified_base 1: mod_base = OTHER; note = 2'-O-methyluridine-3'-phosphate 5'phosphate
  modified_base 2: mod_base = OTHER; note = 2'-deoxy-2'-fluorouridine-3'-phosphate
  modified_base 3: mod_base = OTHER; note = 2'-O-methyladenosine-3'-phosphate
  modified_base 4: mod_base = OTHER; note = 2'-O-methylcytidine-3'-phosphate
  modified_base 5: mod_base = OTHER; note = 2'-O-methyladenosine-3'-phosphate
  modified_base 6: mod_base = OTHER; note = 2'-deoxy-2'-fluorouridine-3'-phosphate
  modified_base 7: mod_base = OTHER; note = 2'-O-methyluridine-3'-phosphate
  modified_base 8: mod_base = OTHER; note = 2'-O-methylcytidine-3'-phosphate
  modified_base 9: mod_base = OTHER; note = 2'-O-methylcytidine-3'-phosphate
  modified_base 10: mod_base = OTHER; note = 2'-O-methyluridine-3'-phosphate
  modified_base 11: mod_base = OTHER; note = 2'-O-methylcytidine-3'-phosphate
  modified_base 12: mod_base = OTHER; note = 2'-O-methyluridine-3'-phosphate
  modified_base 13: mod_base = OTHER; note = 2'-O-methyluridine-3'-phosphate
  modified_base 14: mod_base = OTHER; note = 2'-deoxy-2'-fluorocytidine-3'-phosphate
  modified_base 15: mod_base = OTHER; note = 2'-O-methyladenosine-3'-phosphate
  modified_base 16: mod_base = OTHER; note = 2'-deoxy-2'-fluorocytidine-3'-phosphate
  modified_base 17: mod_base = OTHER; note = 2'-O-methyladenosine-3'-phosphate
  modified_base 18: mod_base = OTHER; note = 2'-O-methylcytidine-3'-phosphate
  modified_base 19: mod_base = OTHER; note = 2'-O-methyluridine-3'-phosphate
  modified_base 20: mod_base = OTHER; note = 2'-O-methylcytidine-3'-phosphate
  modified_base 21: mod_base = OTHER; note = 2'-O-methyladenosine-3'-phosphate
  modified_base 22: mod_base = OTHER; note = 2'-O-methyladenosine-3'-phosphate
  modified_base 23: mod_base = OTHER; note = 2'-O-methylguanosine
ttacattcctcttcacactcaag

SEQ ID NO: 4708 - RNA, 23 nt, synthetic construct
  source 1..23: mol_type = other RNA
  modified_base 1: mod_base = OTHER; note = 2'-O-methyluridine-3'-phosphate 5'phosphate
  modified_base 2: mod_base = OTHER; note = 2'-deoxy-2'-fluoroadenosine-3'-phosphate
  modified_base 3: mod_base = OTHER; note = 2'-O-methyluridine-3'-phosphate
  modified_base 4: mod_base = OTHER; note = 2'-O-methyladenosine-3'-phosphate
  modified_base 5: mod_base = OTHER; note = 2'-O-methylcytidine-3'-phosphate
  modified_base 6: mod_base = OTHER; note = 2'-deoxy-2'-fluoroadenosine-3'-phosphate
  modified_base 7: mod_base = OTHER; note = 2'-O-methyluridine-3'-phosphate
  modified_base 8: mod_base = OTHER; note = 2'-O-methyluridine-3'-phosphate
  modified_base 9: mod_base = OTHER; note = 2'-O-methylcytidine-3'-phosphate
  modified_base 10: mod_base = OTHER; note = 2'-O-methylcytidine-3'-phosphate
  modified_base 11: mod_base = OTHER; note = 2'-O-methyluridine-3'-phosphate
  modified_base 12: mod_base = OTHER; note = 2'-O-methylcytidine-3'-phosphate
  modified_base 13: mod_base = OTHER; note = 2'-O-methyluridine-3'-phosphate
  modified_base 14: mod_base = OTHER; note = 2'-deoxy-2'-fluorouridine-3'-phosphate
  modified_base 15: mod_base = OTHER; note = 2'-O-methylcytidine-3'-phosphate
  modified_base 16: mod_base = OTHER; note = 2'-deoxy-2'-fluoroadenosine-3'-phosphate
  modified_base 17: mod_base = OTHER; note = 2'-O-methylcytidine-3'-phosphate
  modified_base 18: mod_base = OTHER; note = 2'-O-methyladenosine-3'-phosphate
  modified_base 19: mod_base = OTHER; note = 2'-O-methylcytidine-3'-phosphate
  modified_base 20: mod_base = OTHER; note = 2'-O-methyluridine-3'-phosphate
  modified_base 21: mod_base = OTHER; note = 2'-O-methylcytidine-3'-phosphate
  modified_base 22: mod_base = OTHER; note = 2'-O-methyladenosine-3'-phosphate
  modified_base 23: mod_base = OTHER; note = 2'-O-methyladenosine
tatacattcctcttcacactcaa

SEQ ID NO: 4709 - RNA, 23 nt, synthetic construct
  source 1..23: mol_type = other RNA
  modified_base 1: mod_base = OTHER; note = 2'-O-methyluridine-3'-phosphate 5'phosphate
  modified_base 2: mod_base = OTHER; note = 2'-deoxy-2'-fluorocytidine-3'-phosphate
  modified_base 3: mod_base = OTHER; note = 2'-O-methyladenosine-3'-phosphate
  modified_base 4: mod_base = OTHER; note = 2'-O-methyluridine-3'-phosphate
  modified_base 5: mod_base = OTHER; note = 2'-O-methyladenosine-3'-phosphate
  modified_base 6: mod_base = OTHER; note = 2'-deoxy-2'-fluorocytidine-3'-phosphate
  modified_base 7: mod_base = OTHER; note = 2'-O-methyladenosine-3'-phosphate
  modified_base 8: mod_base = OTHER; note = 2'-O-methyluridine-3'-phosphate
  modified_base 9: mod_base = OTHER; note = 2'-O-methyluridine-3'-phosphate
  modified_base 10: mod_base = OTHER; note = 2'-O-methylcytidine-3'-phosphate
  modified_base 11: mod_base = OTHER; note = 2'-O-methylcytidine-3'-phosphate
  modified_base 12: mod_base = OTHER; note = 2'-O-methyluridine-3'-phosphate
  modified_base 13: mod_base = OTHER; note = 2'-O-methylcytidine-3'-phosphate
  modified_base 14: mod_base = OTHER; note = 2'-deoxy-2'-fluorouridine-3'-phosphate
  modified_base 15: mod_base = OTHER; note = 2'-O-methyluridine-3'-phosphate
  modified_base 16: mod_base = OTHER; note = 2'-deoxy-2'-fluorocytidine-3'-phosphate
  modified_base 17: mod_base = OTHER; note = 2'-O-methyladenosine-3'-phosphate
  modified_base 18: mod_base = OTHER; note = 2'-O-methylcytidine-3'-phosphate
  modified_base 19: mod_base = OTHER; note = 2'-O-methyladenosine-3'-phosphate
  modified_base 20: mod_base = OTHER; note = 2'-O-methylcytidine-3'-phosphate
  modified_base 21: mod_base = OTHER; note = 2'-O-methyluridine-3'-phosphate
  modified_base 22: mod_base = OTHER; note = 2'-O-methylcytidine-3'-phosphate
  modified_base 23: mod_base = OTHER; note = 2'-O-methyladenosine
tcatacattcctcttcacactca

SEQ ID NO: 4710 - RNA, 23 nt, synthetic construct
  source 1..23: mol_type = other RNA
  modified_base 1: mod_base = OTHER; note = 2'-O-methyluridine-3'-phosphate 5'phosphate
  modified_base 2: mod_base = OTHER; note = 2'-deoxy-2'-fluoroguanosine-3'-phosphate
  modified_base 3: mod_base = OTHER; note = 2'-O-methylcytidine-3'-phosphate
  modified_base 4: mod_base = OTHER; note = 2'-O-methyladenosine-3'-phosphate
  modified_base 5: mod_base = OTHER; note = 2'-O-methyluridine-3'-phosphate
  modified_base 6: mod_base = OTHER; note = 2'-deoxy-2'-fluoroadenosine-3'-phosphate
  modified_base 7: mod_base = OTHER; note = 2'-O-methylcytidine-3'-phosphate
  modified_base 8: mod_base = OTHER; note = 2'-O-methyladenosine-3'-phosphate
  modified_base 9: mod_base = OTHER; note = 2'-O-methyluridine-3'-phosphate
  modified_base 10: mod_base = OTHER; note = 2'-O-methyluridine-3'-phosphate
  modified_base 11: mod_base = OTHER; note = 2'-O-methylcytidine-3'-phosphate
  modified_base 12: mod_base = OTHER; note = 2'-O-methylcytidine-3'-phosphate
  modified_base 13: mod_base = OTHER; note = 2'-O-methyluridine-3'-phosphate
  modified_base 14: mod_base = OTHER; note = 2'-deoxy-2'-fluorocytidine-3'-phosphate
  modified_base 15: mod_base = OTHER; note = 2'-O-methyluridine-3'-phosphate
  modified_base 16: mod_base = OTHER; note = 2'-deoxy-2'-fluorouridine-3'-phosphate
  modified_base 17: mod_base = OTHER; note = 2'-O-methylcytidine-3'-phosphate
  modified_base 18: mod_base = OTHER; note = 2'-O-methyladenosine-3'-phosphate
  modified_base 19: mod_base = OTHER; note = 2'-O-methylcytidine-3'-phosphate
  modified_base 20: mod_base = OTHER; note = 2'-O-methyladenosine-3'-phosphate
  modified_base 21: mod_base = OTHER; note = 2'-O-methylcytidine-3'-phosphate
  modified_base 22: mod_base = OTHER; note = 2'-O-methyluridine-3'-phosphate
  modified_base 23: mod_base = OTHER; note = 2'-O-methylcytidine
tgcatacattcctcttcacactc

SEQ ID NO: 4711 - RNA, 23 nt, synthetic construct
  source 1..23: mol_type = other RNA
  modified_base 1: mod_base = OTHER; note = 2'-O-methyluridine-3'-phosphate 5'phosphate
  modified_base 2: mod_base = OTHER; note = 2'-deoxy-2'-fluorouridine-3'-phosphate
  modified_base 3: mod_base = OTHER; note = 2'-O-methylguanosine-3'-phosphate
  modified_base 4: mod_base = OTHER; note = 2'-O-methylcytidine-3'-phosphate
  modified_base 5: mod_base = OTHER; note = 2'-O-methyladenosine-3'-phosphate
  modified_base 6: mod_base = OTHER; note = 2'-deoxy-2'-fluorouridine-3'-phosphate
  modified_base 7: mod_base = OTHER; note = 2'-O-methyladenosine-3'-phosphate
  modified_base 8: mod_base = OTHER; note = 2'-O-methylcytidine-3'-phosphate
  modified_base 9: mod_base = OTHER; note = 2'-O-methyladenosine-3'-phosphate
  modified_base 10: mod_base = OTHER; note = 2'-O-methyluridine-3'-phosphate
  modified_base 11: mod_base = OTHER; note = 2'-O-methyluridine-3'-phosphate
  modified_base 12: mod_base = OTHER; note = 2'-O-methylcytidine-3'-phosphate
  modified_base 13: mod_base = OTHER; note = 2'-O-methylcytidine-3'-phosphate
  modified_base 14: mod_base = OTHER; note = 2'-deoxy-2'-fluorouridine-3'-phosphate
  modified_base 15: mod_base = OTHER; note = 2'-O-methylcytidine-3'-phosphate
  modified_base 16: mod_base = OTHER; note = 2'-deoxy-2'-fluorouridine-3'-phosphate
  modified_base 17: mod_base = OTHER; note = 2'-O-methyluridine-3'-phosphate
  modified_base 18: mod_base = OTHER; note = 2'-O-methylcytidine-3'-phosphate
  modified_base 19: mod_base = OTHER; note = 2'-O-methyladenosine-3'-phosphate
  modified_base 20: mod_base = OTHER; note = 2'-O-methylcytidine-3'-phosphate
  modified_base 21: mod_base = OTHER; note = 2'-O-methyladenosine-3'-phosphate
  modified_base 22: mod_base = OTHER; note = 2'-O-methylcytidine-3'-phosphate
  modified_base 23: mod_base = OTHER; note = 2'-O-methyluridine
ttgcatacattcctcttcacact

SEQ ID NO: 4712 - RNA, 23 nt, synthetic construct
  source 1..23: mol_type = other RNA
  modified_base 1: mod_base = OTHER; note = 2'-O-methyluridine-3'-phosphate 5'phosphate
  modified_base 2: mod_base = OTHER; note = 2'-deoxy-2'-fluoroadenosine-3'-phosphate
  modified_base 3: mod_base = OTHER; note = 2'-O-methyluridine-3'-phosphate
  modified_base 4: mod_base = OTHER; note = 2'-O-methylguanosine-3'-phosphate
  modified_base 5: mod_base = OTHER; note = 2'-O-methylcytidine-3'-phosphate
  modified_base 6: mod_base = OTHER; note = 2'-deoxy-2'-fluoroadenosine-3'-phosphate
  modified_base 7: mod_base = OTHER; note = 2'-O-methyluridine-3'-phosphate
  modified_base 8: mod_base = OTHER; note = 2'-O-methyladenosine-3'-phosphate
  modified_base 9: mod_base = OTHER; note = 2'-O-methylcytidine-3'-phosphate
  modified_base 10: mod_base = OTHER; note = 2'-O-methyladenosine-3'-phosphate
  modified_base 11: mod_base = OTHER; note = 2'-O-methyluridine-3'-phosphate
  modified_base 12: mod_base = OTHER; note = 2'-O-methyluridine-3'-phosphate
  modified_base 13: mod_base = OTHER; note = 2'-O-methylcytidine-3'-phosphate
  modified_base 14: mod_base = OTHER; note = 2'-deoxy-2'-fluorocytidine-3'-phosphate
  modified_base 15: mod_base = OTHER; note = 2'-O-methyluridine-3'-phosphate
  modified_base 16: mod_base = OTHER; note = 2'-deoxy-2'-fluorocytidine-3'-phosphate
  modified_base 17: mod_base = OTHER; note = 2'-O-methyluridine-3'-phosphate
  modified_base 18: mod_base = OTHER; note = 2'-O-methyluridine-3'-phosphate
  modified_base 19: mod_base = OTHER; note = 2'-O-methylcytidine-3'-phosphate
  modified_base 20: mod_base = OTHER; note = 2'-O-methyladenosine-3'-phosphate
  modified_base 21: mod_base = OTHER; note = 2'-O-methylcytidine-3'-phosphate
  modified_base 22: mod_base = OTHER; note = 2'-O-methyladenosine-3'-phosphate
  modified_base 23: mod_base = OTHER; note = 2'-O-methylcytidine
tatgcatacattcctcttcacac

SEQ ID NO: 4713 - RNA, 23 nt, synthetic construct
  source 1..23: mol_type = other RNA
  modified_base 1: mod_base = OTHER; note = 2'-O-methyluridine-3'-phosphate 5'phosphate
  modified_base 2: mod_base = OTHER; note = 2'-deoxy-2'-fluoroadenosine-3'-phosphate
  modified_base 3: mod_base = OTHER; note = 2'-O-methyladenosine-3'-phosphate
  modified_base 4: mod_base = OTHER; note = 2'-O-methyluridine-3'-phosphate
  modified_base 5: mod_base = OTHER; note = 2'-O-methylguanosine-3'-phosphate
  modified_base 6: mod_base = OTHER; note = 2'-deoxy-2'-fluorocytidine-3'-phosphate
  modified_base 7: mod_base = OTHER; note = 2'-O-methyladenosine-3'-phosphate
  modified_base 8: mod_base = OTHER; note = 2'-O-methyluridine-3'-phosphate
  modified_base 9: mod_base = OTHER; note = 2'-O-methyladenosine-3'-phosphate
  modified_base 10: mod_base = OTHER; note = 2'-O-methylcytidine-3'-phosphate
  modified_base 11: mod_base = OTHER; note = 2'-O-methyladenosine-3'-phosphate
  modified_base 12: mod_base = OTHER; note = 2'-O-methyluridine-3'-phosphate
  modified_base 13: mod_base = OTHER; note = 2'-O-methyluridine-3'-phosphate
  modified_base 14: mod_base = OTHER; note = 2'-deoxy-2'-fluorocytidine-3'-phosphate
  modified_base 15: mod_base = OTHER; note = 2'-O-methylcytidine-3'-phosphate
  modified_base 16: mod_base = OTHER; note = 2'-deoxy-2'-fluorouridine-3'-phosphate
  modified_base 17: mod_base = OTHER; note = 2'-O-methylcytidine-3'-phosphate
  modified_base 18: mod_base = OTHER; note = 2'-O-methyluridine-3'-phosphate
  modified_base 19: mod_base = OTHER; note = 2'-O-methyluridine-3'-phosphate
  modified_base 20: mod_base = OTHER; note = 2'-O-methylcytidine-3'-phosphate
  modified_base 21: mod_base = OTHER; note = 2'-O-methyladenosine-3'-phosphate
  modified_base 22: mod_base = OTHER; note = 2'-O-methylcytidine-3'-phosphate
  modified_base 23: mod_base = OTHER; note = 2'-O-methyladenosine
taatgcatacattcctcttcaca

SEQ ID NO: 4714 - RNA, 23 nt, synthetic construct
  source 1..23: mol_type = other RNA
  modified_base 1: mod_base = OTHER; note = 2'-O-methyluridine-3'-phosphate 5'phosphate
  modified_base 2: mod_base = OTHER; note = 2'-deoxy-2'-fluorocytidine-3'-phosphate
  modified_base 3: mod_base = OTHER; note = 2'-O-methyladenosine-3'-phosphate
  modified_base 4: mod_base = OTHER; note = 2'-O-methyladenosine-3'-phosphate
  modified_base 5: mod_base = OTHER; note = 2'-O-methyluridine-3'-phosphate
  modified_base 6: mod_base = OTHER; note = 2'-deoxy-2'-fluoroguanosine-3'-phosphate
  modified_base 7: mod_base = OTHER; note = 2'-O-methylcytidine-3'-phosphate
  modified_base 8: mod_base = OTHER; note = 2'-O-methyladenosine-3'-phosphate
  modified_base 9: mod_base = OTHER; note = 2'-O-methyluridine-3'-phosphate
  modified_base 10: mod_base = OTHER; note = 2'-O-methyladenosine-3'-phosphate
  modified_base 11: mod_base = OTHER; note = 2'-O-methylcytidine-3'-phosphate
  modified_base 12: mod_base = OTHER; note = 2'-O-methyladenosine-3'-phosphate
  modified_base 13: mod_base = OTHER; note = 2'-O-methyluridine-3'-phosphate
  modified_base 14: mod_base = OTHER; note = 2'-deoxy-2'-fluorouridine-3'-phosphate
  modified_base 15: mod_base = OTHER; note = 2'-O-methylcytidine-3'-phosphate
  modified_base 16: mod_base = OTHER; note = 2'-deoxy-2'-fluorocytidine-3'-phosphate
  modified_base 17: mod_base = OTHER; note = 2'-O-methyluridine-3'-phosphate
  modified_base 18: mod_base = OTHER; note = 2'-O-methylcytidine-3'-phosphate
  modified_base 19: mod_base = OTHER; note = 2'-O-methyluridine-3'-phosphate
  modified_base 20: mod_base = OTHER; note = 2'-O-methyluridine-3'-phosphate
  modified_base 21: mod_base = OTHER; note = 2'-O-methylcytidine-3'-phosphate
  modified_base 22: mod_base = OTHER; note = 2'-O-methyladenosine-3'-phosphate
  modified_base 23: mod_base = OTHER; note = 2'-O-methylcytidine
tcaatgcatacattcctcttcac

SEQ ID NO: 4715 - RNA, 23 nt, synthetic construct
  source 1..23: mol_type = other RNA
  modified_base 1: mod_base = OTHER; note = 2'-O-methyluridine-3'-phosphate 5'phosphate
  modified_base 2: mod_base = OTHER; note = 2'-deoxy-2'-fluoroguanosine-3'-phosphate
  modified_base 3: mod_base = OTHER; note = 2'-O-methylcytidine-3'-phosphate
  modified_base 4: mod_base = OTHER; note = 2'-O-methyladenosine-3'-phosphate
  modified_base 5: mod_base = OTHER; note = 2'-O-methyladenosine-3'-phosphate
  modified_base 6: mod_base = OTHER; note = 2'-deoxy-2'-fluorouridine-3'-phosphate
  modified_base 7: mod_base = OTHER; note = 2'-O-methylguanosine-3'-phosphate
  modified_base 8: mod_base = OTHER; note = 2'-O-methylcytidine-3'-phosphate
  modified_base 9: mod_base = OTHER; note = 2'-O-methyladenosine-3'-phosphate
  modified_base 10: mod_base = OTHER; note = 2'-O-methyluridine-3'-phosphate
  modified_base 11: mod_base = OTHER; note = 2'-O-methyladenosine-3'-phosphate
  modified_base 12: mod_base = OTHER; note = 2'-O-methylcytidine-3'-phosphate
  modified_base 13: mod_base = OTHER; note = 2'-O-methyladenosine-3'-phosphate
  modified_base 14: mod_base = OTHER; note = 2'-deoxy-2'-fluorouridine-3'-phosphate
  modified_base 15: mod_base = OTHER; note = 2'-O-methyluridine-3'-phosphate
  modified_base 16: mod_base = OTHER; note = 2'-deoxy-2'-fluorocytidine-3'-phosphate
  modified_base 17: mod_base = OTHER; note = 2'-O-methylcytidine-3'-phosphate
  modified_base 18: mod_base = OTHER; note = 2'-O-methyluridine-3'-phosphate
  modified_base 19: mod_base = OTHER; note = 2'-O-methylcytidine-3'-phosphate
  modified_base 20: mod_base = OTHER; note = 2'-O-methyluridine-3'-phosphate
  modified_base 21: mod_base = OTHER; note = 2'-O-methyluridine-3'-phosphate
  modified_base 22: mod_base = OTHER; note = 2'-O-methylcytidine-3'-phosphate
  modified_base 23: mod_base = OTHER; note = 2'-O-methyladenosine
tgcaatgcatacattcctcttca

SEQ ID NO: 4716 - RNA, 23 nt, synthetic construct
  source 1..23: mol_type = other RNA
  modified_base 1: mod_base = OTHER; note = 2'-O-methyluridine-3'-phosphate 5'phosphate
  modified_base 2: mod_base = OTHER; note = 2'-deoxy-2'-fluorouridine-3'-phosphate
  modified_base 3: mod_base = OTHER; note = 2'-O-methylguanosine-3'-phosphate
  modified_base 4: mod_base = OTHER; note = 2'-O-methylcytidine-3'-phosphate
  modified_base 5: mod_base = OTHER; note = 2'-O-methyladenosine-3'-phosphate
  modified_base 6: mod_base = OTHER; note = 2'-deoxy-2'-fluoroadenosine-3'-phosphate
  modified_base 7: mod_base = OTHER; note = 2'-O-methyluridine-3'-phosphate
  modified_base 8: mod_base = OTHER; note = 2'-O-methylguanosine-3'-phosphate
  modified_base 9: mod_base = OTHER; note = 2'-O-methylcytidine-3'-phosphate
  modified_base 10: mod_base = OTHER; note = 2'-O-methyladenosine-3'-phosphate
  modified_base 11: mod_base = OTHER; note = 2'-O-methyluridine-3'-phosphate
  modified_base 12: mod_base = OTHER; note = 2'-O-methyladenosine-3'-phosphate
  modified_base 13: mod_base = OTHER; note = 2'-O-methylcytidine-3'-phosphate
  modified_base 14: mod_base = OTHER; note = 2'-deoxy-2'-fluoroadenosine-3'-phosphate
  modified_base 15: mod_base = OTHER; note = 2'-O-methyluridine-3'-phosphate
  modified_base 16: mod_base = OTHER; note = 2'-deoxy-2'-fluorouridine-3'-phosphate
  modified_base 17: mod_base = OTHER; note = 2'-O-methylcytidine-3'-phosphate
  modified_base 18: mod_base = OTHER; note = 2'-O-methylcytidine-3'-phosphate
  modified_base 19: mod_base = OTHER; note = 2'-O-methyluridine-3'-phosphate
  modified_base 20: mod_base = OTHER; note = 2'-O-methylcytidine-3'-phosphate
  modified_base 21: mod_base = OTHER; note = 2'-O-methyluridine-3'-phosphate
  modified_base 22: mod_base = OTHER; note = 2'-O-methyluridine-3'-phosphate
  modified_base 23: mod_base = OTHER; note = 2'-O-methylcytidine
ttgcaatgcatacattcctcttc

SEQ ID NO: 4717 - RNA, 23 nt, synthetic construct
  source 1..23: mol_type = other RNA
  modified_base 1: mod_base = OTHER; note = 2'-O-methyluridine-3'-phosphate 5'phosphate
  modified_base 2: mod_base = OTHER; note = 2'-deoxy-2'-fluorocytidine-3'-phosphate
  modified_base 3: mod_base = OTHER; note = 2'-O-methyluridine-3'-phosphate
  modified_base 4: mod_base = OTHER; note = 2'-O-methylguanosine-3'-phosphate
  modified_base 5: mod_base = OTHER; note = 2'-O-methylcytidine-3'-phosphate
  modified_base 6: mod_base = OTHER; note = 2'-deoxy-2'-fluoroadenosine-3'-phosphate
  modified_base 7: mod_base = OTHER; note = 2'-O-methyladenosine-3'-phosphate
  modified_base 8: mod_base = OTHER; note = 2'-O-methyluridine-3'-phosphate
  modified_base 9: mod_base = OTHER; note = 2'-O-methylguanosine-3'-phosphate
  modified_base 10: mod_base = OTHER; note = 2'-O-methylcytidine-3'-phosphate
  modified_base 11: mod_base = OTHER; note = 2'-O-methyladenosine-3'-phosphate
  modified_base 12: mod_base = OTHER; note = 2'-O-methyluridine-3'-phosphate
  modified_base 13: mod_base = OTHER; note = 2'-O-methyladenosine-3'-phosphate
  modified_base 14: mod_base = OTHER; note = 2'-deoxy-2'-fluorocytidine-3'-phosphate
  modified_base 15: mod_base = OTHER; note = 2'-O-methyladenosine-3'-phosphate
  modified_base 16: mod_base = OTHER; note = 2'-deoxy-2'-fluorouridine-3'-phosphate
  modified_base 17: mod_base = OTHER; note = 2'-O-methyluridine-3'-phosphate
  modified_base 18: mod_base = OTHER; note = 2'-O-methylcytidine-3'-phosphate
  modified_base 19: mod_base = OTHER; note = 2'-O-methylcytidine-3'-phosphate
  modified_base 20: mod_base = OTHER; note = 2'-O-methyluridine-3'-phosphate
  modified_base 21: mod_base = OTHER; note = 2'-O-methylcytidine-3'-phosphate
  modified_base 22: mod_base = OTHER; note = 2'-O-methyluridine-3'-phosphate
  modified_base 23: mod_base = OTHER; note = 2'-O-methyluridine
tctgcaatgcatacattcctctt

SEQ ID NO: 4718 - RNA, 23 nt, synthetic construct
  source 1..23: mol_type = other RNA
  modified_base 1: mod_base = OTHER; note = 2'-O-methyluridine-3'-phosphate 5'phosphate
  modified_base 2: mod_base = OTHER; note = 2'-deoxy-2'-fluorocytidine-3'-phosphate
  modified_base 3: mod_base = OTHER; note = 2'-O-methyladenosine-3'-phosphate
  modified_base 4: mod_base = OTHER; note = 2'-O-methylcytidine-3'-phosphate
  modified_base 5: mod_base = OTHER; note = 2'-O-methyluridine-3'-phosphate
  modified_base 6: mod_base = OTHER; note = 2'-deoxy-2'-fluoroguanosine-3'-phosphate
  modified_base 7: mod_base = OTHER; note = 2'-O-methylcytidine-3'-phosphate
  modified_base 8: mod_base = OTHER; note = 2'-O-methyladenosine-3'-phosphate
  modified_base 9: mod_base = OTHER; note = 2'-O-methyladenosine-3'-phosphate
  modified_base 10: mod_base = OTHER; note = 2'-O-methyluridine-3'-phosphate
  modified_base 11: mod_base = OTHER; note = 2'-O-methylguanosine-3'-phosphate
  modified_base 12: mod_base = OTHER; note = 2'-O-methylcytidine-3'-phosphate
  modified_base 13: mod_base = OTHER; note = 2'-O-methyladenosine-3'-phosphate
  modified_base 14: mod_base = OTHER; note = 2'-deoxy-2'-fluorouridine-3'-phosphate
  modified_base 15: mod_base = OTHER; note = 2'-O-methyladenosine-3'-phosphate
  modified_base 16: mod_base = OTHER; note = 2'-deoxy-2'-fluorocytidine-3'-phosphate
  modified_base 17: mod_base = OTHER; note = 2'-O-methyladenosine-3'-phosphate
  modified_base 18: mod_base = OTHER; note = 2'-O-methyluridine-3'-phosphate
  modified_base 19: mod_base = OTHER; note = 2'-O-methyluridine-3'-phosphate
  modified_base 20: mod_base = OTHER; note = 2'-O-methylcytidine-3'-phosphate
  modified_base 21: mod_base = OTHER; note = 2'-O-methylcytidine-3'-phosphate
  modified_base 22: mod_base = OTHER; note = 2'-O-methyluridine-3'-phosphate
  modified_base 23: mod_base = OTHER; note = 2'-O-methylcytidine
tcactgcaatgcatacattcctc

SEQ ID NO: 4719 - RNA, 23 nt, synthetic construct
  source 1..23: mol_type = other RNA
  modified_base 1: mod_base = OTHER; note = 2'-O-methyluridine-3'-phosphate 5'phosphate
  modified_base 2: mod_base = OTHER; note = 2'-deoxy-2'-fluorocytidine-3'-phosphate
  modified_base 3: mod_base = OTHER; note = 2'-O-methylcytidine-3'-phosphate
  modified_base 4: mod_base = OTHER; note = 2'-O-methyladenosine-3'-phosphate
  modified_base 5: mod_base = OTHER; note = 2'-O-methylcytidine-3'-phosphate
  modified_base 6: mod_base = OTHER; note = 2'-deoxy-2'-fluorouridine-3'-phosphate
  modified_base 7: mod_base = OTHER; note = 2'-O-methylguanosine-3'-phosphate
  modified_base 8: mod_base = OTHER; note = 2'-O-methylcytidine-3'-phosphate
  modified_base 9: mod_base = OTHER; note = 2'-O-methyladenosine-3'-phosphate
  modified_base 10: mod_base = OTHER; note = 2'-O-methyladenosine-3'-phosphate
  modified_base 11: mod_base = OTHER; note = 2'-O-methyluridine-3'-phosphate
  modified_base 12: mod_base = OTHER; note = 2'-O-methylguanosine-3'-phosphate
  modified_base 13: mod_base = OTHER; note = 2'-O-methylcytidine-3'-phosphate
  modified_base 14: mod_base = OTHER; note = 2'-deoxy-2'-fluoroadenosine-3'-phosphate
  modified_base 15: mod_base = OTHER; note = 2'-O-methyluridine-3'-phosphate
  modified_base 16: mod_base = OTHER; note = 2'-deoxy-2'-fluoroadenosine-3'-phosphate
  modified_base 17: mod_base = OTHER; note = 2'-O-methylcytidine-3'-phosphate
  modified_base 18: mod_base = OTHER; note = 2'-O-methyladenosine-3'-phosphate
  modified_base 19: mod_base = OTHER; note = 2'-O-methyluridine-3'-phosphate
  modified_base 20: mod_base = OTHER; note = 2'-O-methyluridine-3'-phosphate
  modified_base 21: mod_base = OTHER; note = 2'-O-methylcytidine-3'-phosphate
  modified_base 22: mod_base = OTHER; note = 2'-O-methylcytidine-3'-phosphate
  modified_base 23: mod_base = OTHER; note = 2'-O-methyluridine
tccactgcaatgcatacattcct

SEQ ID NO: 4720 - RNA, 23 nt, synthetic construct
  source 1..23: mol_type = other RNA
  modified_base 1: mod_base = OTHER; note = 2'-O-methyluridine-3'-phosphate 5'phosphate
  modified_base 2: mod_base = OTHER; note = 2'-deoxy-2'-fluorouridine-3'-phosphate
  modified_base 3: mod_base = OTHER; note = 2'-O-methylcytidine-3'-phosphate
  modified_base 4: mod_base = OTHER; note = 2'-O-methylcytidine-3'-phosphate
  modified_base 5: mod_base = OTHER; note = 2'-O-methyladenosine-3'-phosphate
  modified_base 6: mod_base = OTHER; note = 2'-deoxy-2'-fluorocytidine-3'-phosphate
  modified_base 7: mod_base = OTHER; note = 2'-O-methyluridine-3'-phosphate
  modified_base 8: mod_base = OTHER; note = 2'-O-methylguanosine-3'-phosphate
  modified_base 9: mod_base = OTHER; note = 2'-O-methylcytidine-3'-phosphate
  modified_base 10: mod_base = OTHER; note = 2'-O-methyladenosine-3'-phosphate
  modified_base 11: mod_base = OTHER; note = 2'-O-methyladenosine-3'-phosphate
  modified_base 12: mod_base = OTHER; note = 2'-O-methyluridine-3'-phosphate
  modified_base 13: mod_base = OTHER; note = 2'-O-methylguanosine-3'-phosphate
  modified_base 14: mod_base = OTHER; note = 2'-deoxy-2'-fluorocytidine-3'-phosphate
  modified_base 15: mod_base = OTHER; note = 2'-O-methyladenosine-3'-phosphate
  modified_base 16: mod_base = OTHER; note = 2'-deoxy-2'-fluorouridine-3'-phosphate
  modified_base 17: mod_base = OTHER; note = 2'-O-methyladenosine-3'-phosphate
  modified_base 18: mod_base = OTHER; note = 2'-O-methylcytidine-3'-phosphate
  modified_base 19: mod_base = OTHER; note = 2'-O-methyladenosine-3'-phosphate
  modified_base 20: mod_base = OTHER; note = 2'-O-methyluridine-3'-phosphate
  modified_base 21: mod_base = OTHER; note = 2'-O-methyluridine-3'-phosphate
  modified_base 22: mod_base = OTHER; note = 2'-O-methylcytidine-3'-phosphate
  modified_base 23: mod_base = OTHER; note = 2'-O-methylcytidine
ttccactgcaatgcatacattcc

SEQ ID NO: 4721 - RNA, 23 nt, synthetic construct
  source 1..23: mol_type = other RNA
  modified_base 1: mod_base = OTHER; note = 2'-O-methyluridine-3'-phosphate 5'phosphate
  modified_base 2: mod_base = OTHER; note = 2'-deoxy-2'-fluorocytidine-3'-phosphate
  modified_base 3: mod_base = OTHER; note = 2'-O-methyluridine-3'-phosphate
  modified_base 4: mod_base = OTHER; note = 2'-O-methylcytidine-3'-phosphate
  modified_base 5: mod_base = OTHER; note = 2'-O-methylcytidine-3'-phosphate
  modified_base 6: mod_base = OTHER; note = 2'-deoxy-2'-fluoroadenosine-3'-phosphate
  modified_base 7: mod_base = OTHER; note = 2'-O-methylcytidine-3'-phosphate
  modified_base 8: mod_base = OTHER; note = 2'-O-methyluridine-3'-phosphate
  modified_base 9: mod_base = OTHER; note = 2'-O-methylguanosine-3'-phosphate
  modified_base 10: mod_base = OTHER; note = 2'-O-methylcytidine-3'-phosphate
  modified_base 11: mod_base = OTHER; note = 2'-O-methyladenosine-3'-phosphate
  modified_base 12: mod_base = OTHER; note = 2'-O-methyladenosine-3'-phosphate
  modified_base 13: mod_base = OTHER; note = 2'-O-methyluridine-3'-phosphate
  modified_base 14: mod_base = OTHER; note = 2'-deoxy-2'-fluoroguanosine-3'-phosphate
  modified_base 15: mod_base = OTHER; note = 2'-O-methylcytidine-3'-phosphate
  modified_base 16: mod_base = OTHER; note = 2'-deoxy-2'-fluoroadenosine-3'-phosphate
  modified_base 17: mod_base = OTHER; note = 2'-O-methyluridine-3'-phosphate
  modified_base 18: mod_base = OTHER; note = 2'-O-methyladenosine-3'-phosphate
  modified_base 19: mod_base = OTHER; note = 2'-O-methylcytidine-3'-phosphate
  modified_base 20: mod_base = OTHER; note = 2'-O-methyladenosine-3'-phosphate
  modified_base 21: mod_base = OTHER; note = 2'-O-methyluridine-3'-phosphate
  modified_base 22: mod_base = OTHER; note = 2'-O-methyluridine-3'-phosphate
  modified_base 23: mod_base = OTHER; note = 2'-O-methylcytidine
tctccactgcaatgcatacattc

SEQ ID NO: 4722 - RNA, 23 nt, synthetic construct
  source 1..23: mol_type = other RNA
  modified_base 1: mod_base = OTHER; note = 2'-O-methyluridine-3'-phosphate 5'phosphate
  modified_base 2: mod_base = OTHER; note = 2'-deoxy-2'-fluorouridine-3'-phosphate
  modified_base 3: mod_base = OTHER; note = 2'-O-methylcytidine-3'-phosphate
  modified_base 4: mod_base = OTHER; note = 2'-O-methyluridine-3'-phosphate
  modified_base 5: mod_base = OTHER; note = 2'-O-methylcytidine-3'-phosphate
  modified_base 6: mod_base = OTHER; note = 2'-deoxy-2'-fluorocytidine-3'-phosphate
  modified_base 7: mod_base = OTHER; note = 2'-O-methyladenosine-3'-phosphate
  modified_base 8: mod_base = OTHER; note = 2'-O-methylcytidine-3'-phosphate
  modified_base 9: mod_base = OTHER; note = 2'-O-methyluridine-3'-phosphate
  modified_base 10: mod_base = OTHER; note = 2'-O-methylguanosine-3'-phosphate
  modified_base 11: mod_base = OTHER; note = 2'-O-methylcytidine-3'-phosphate
  modified_base 12: mod_base = OTHER; note = 2'-O-methyladenosine-3'-phosphate
  modified_base 13: mod_base = OTHER; note = 2'-O-methyladenosine-3'-phosphate
  modified_base 14: mod_base = OTHER; note = 2'-deoxy-2'-fluorouridine-3'-phosphate
  modified_base 15: mod_base = OTHER; note = 2'-O-methylguanosine-3'-phosphate
  modified_base 16: mod_base = OTHER; note = 2'-deoxy-2'-fluorocytidine-3'-phosphate
  modified_base 17: mod_base = OTHER; note = 2'-O-methyladenosine-3'-phosphate
  modified_base 18: mod_base = OTHER; note = 2'-O-methyluridine-3'-phosphate
  modified_base 19: mod_base = OTHER; note = 2'-O-methyladenosine-3'-phosphate
  modified_base 20: mod_base = OTHER; note = 2'-O-methylcytidine-3'-phosphate
  modified_base 21: mod_base = OTHER; note = 2'-O-methyladenosine-3'-phosphate
  modified_base 22: mod_base = OTHER; note = 2'-O-methyluridine-3'-phosphate
  modified_base 23: mod_base = OTHER; note = 2'-O-methyluridine
ttctccactgcaatgcatacatt

SEQ ID NO: 4723 - RNA, 23 nt, synthetic construct
  source 1..23: mol_type = other RNA
  modified_base 1: mod_base = OTHER; note = 2'-O-methyluridine-3'-phosphate 5'phosphate
  modified_base 2: mod_base = OTHER; note = 2'-deoxy-2'-fluorouridine-3'-phosphate
  modified_base 3: mod_base = OTHER; note = 2'-O-methyluridine-3'-phosphate
  modified_base 4: mod_base = OTHER; note = 2'-O-methylcytidine-3'-phosphate
  modified_base 5: mod_base = OTHER; note = 2'-O-methyluridine-3'-phosphate
  modified_base 6: mod_base = OTHER; note = 2'-deoxy-2'-fluorocytidine-3'-phosphate
  modified_base 7: mod_base = OTHER; note = 2'-O-methylcytidine-3'-phosphate
  modified_base 8: mod_base = OTHER; note = 2'-O-methyladenosine-3'-phosphate
  modified_base 9: mod_base = OTHER; note = 2'-O-methylcytidine-3'-phosphate
  modified_base 10: mod_base = OTHER; note = 2'-O-methyluridine-3'-phosphate
  modified_base 11: mod_base = OTHER; note = 2'-O-methylguanosine-3'-phosphate
  modified_base 12: mod_base = OTHER; note = 2'-O-methylcytidine-3'-phosphate
  modified_base 13: mod_base = OTHER; note = 2'-O-methyladenosine-3'-phosphate
  modified_base 14: mod_base = OTHER; note = 2'-deoxy-2'-fluoroadenosine-3'-phosphate
  modified_base 15: mod_base = OTHER; note = 2'-O-methyluridine-3'-phosphate
  modified_base 16: mod_base = OTHER; note = 2'-deoxy-2'-fluoroguanosine-3'-phosphate
  modified_base 17: mod_base = OTHER; note = 2'-O-methylcytidine-3'-phosphate
  modified_base 18: mod_base = OTHER; note = 2'-O-methyladenosine-3'-phosphate
  modified_base 19: mod_base = OTHER; note = 2'-O-methyluridine-3'-phosphate
  modified_base 20: mod_base = OTHER; note = 2'-O-methyladenosine-3'-phosphate
  modified_base 21: mod_base = OTHER; note = 2'-O-methylcytidine-3'-phosphate
  modified_base 22: mod_base = OTHER; note = 2'-O-methyladenosine-3'-phosphate
  modified_base 23: mod_base = OTHER; note = 2'-O-methyluridine
tttctccactgcaatgcatacat

SEQ ID NO: 4724 - RNA, 23 nt, synthetic construct
  source 1..23: mol_type = other RNA
  modified_base 1: mod_base = OTHER; note = 2'-O-methyluridine-3'-phosphate 5'phosphate
  modified_base 2: mod_base = OTHER; note = 2'-deoxy-2'-fluorouridine-3'-phosphate
  modified_base 3: mod_base = OTHER; note = 2'-O-methyluridine-3'-phosphate
  modified_base 4: mod_base = OTHER; note = 2'-O-methyluridine-3'-phosphate
  modified_base 5: mod_base = OTHER; note = 2'-O-methylcytidine-3'-phosphate
  modified_base 6: mod_base = OTHER; note = 2'-deoxy-2'-fluorouridine-3'-phosphate
  modified_base 7: mod_base = OTHER; note = 2'-O-methylcytidine-3'-phosphate
  modified_base 8: mod_base = OTHER; note = 2'-O-methylcytidine-3'-phosphate
  modified_base 9: mod_base = OTHER; note = 2'-O-methyladenosine-3'-phosphate
  modified_base 10: mod_base = OTHER; note = 2'-O-methylcytidine-3'-phosphate
  modified_base 11: mod_base = OTHER; note = 2'-O-methyluridine-3'-phosphate
  modified_base 12: mod_base = OTHER; note = 2'-O-methylguanosine-3'-phosphate
  modified_base 13: mod_base = OTHER; note = 2'-O-methylcytidine-3'-phosphate
  modified_base 14: mod_base = OTHER; note = 2'-deoxy-2'-fluoroadenosine-3'-phosphate
  modified_base 15: mod_base = OTHER; note = 2'-O-methyladenosine-3'-phosphate
  modified_base 16: mod_base = OTHER; note = 2'-deoxy-2'-fluorouridine-3'-phosphate
  modified_base 17: mod_base = OTHER; note = 2'-O-methylguanosine-3'-phosphate
  modified_base 18: mod_base = OTHER; note = 2'-O-methylcytidine-3'-phosphate
  modified_base 19: mod_base = OTHER; note = 2'-O-methyladenosine-3'-phosphate
  modified_base 20: mod_base = OTHER; note = 2'-O-methyluridine-3'-phosphate
  modified_base 21: mod_base = OTHER; note = 2'-O-methyladenosine-3'-phosphate
  modified_base 22: mod_base = OTHER; note = 2'-O-methylcytidine-3'-phosphate
  modified_base 23: mod_base = OTHER; note = 2'-O-methyladenosine
ttttctccactgcaatgcataca

SEQ ID NO: 4725 - RNA, 23 nt, synthetic construct
  source 1..23: mol_type = other RNA
  modified_base 1: mod_base = OTHER; note = 2'-O-methyluridine-3'-phosphate 5'phosphate
  modified_base 2: mod_base = OTHER; note = 2'-deoxy-2'-fluorouridine-3'-phosphate
  modified_base 3: mod_base = OTHER; note = 2'-O-methyluridine-3'-phosphate
  modified_base 4: mod_base = OTHER; note = 2'-O-methyluridine-3'-phosphate
  modified_base 5: mod_base = OTHER; note = 2'-O-methyluridine-3'-phosphate
  modified_base 6: mod_base = OTHER; note = 2'-deoxy-2'-fluorocytidine-3'-phosphate
  modified_base 7: mod_base = OTHER; note = 2'-O-methyluridine-3'-phosphate
  modified_base 8: mod_base = OTHER; note = 2'-O-methylcytidine-3'-phosphate
  modified_base 9: mod_base = OTHER; note = 2'-O-methylcytidine-3'-phosphate
  modified_base 10: mod_base = OTHER; note = 2'-O-methyladenosine-3'-phosphate
  modified_base 11: mod_base = OTHER; note = 2'-O-methylcytidine-3'-phosphate
  modified_base 12: mod_base = OTHER; note = 2'-O-methyluridine-3'-phosphate
  modified_base 13: mod_base = OTHER; note = 2'-O-methylguanosine-3'-phosphate
  modified_base 14: mod_base = OTHER; note = 2'-deoxy-2'-fluorocytidine-3'-phosphate
  modified_base 15: mod_base = OTHER; note = 2'-O-methyladenosine-3'-phosphate
  modified_base 16: mod_base = OTHER; note = 2'-deoxy-2'-fluoroadenosine-3'-phosphate
  modified_base 17: mod_base = OTHER; note = 2'-O-methyluridine-3'-phosphate
  modified_base 18: mod_base = OTHER; note = 2'-O-methylguanosine-3'-phosphate
  modified_base 19: mod_base = OTHER; note = 2'-O-methylcytidine-3'-phosphate
  modified_base 20: mod_base = OTHER; note = 2'-O-methyladenosine-3'-phosphate
  modified_base 21: mod_base = OTHER; note = 2'-O-methyluridine-3'-phosphate
  modified_base 22: mod_base = OTHER; note = 2'-O-methyladenosine-3'-phosphate
  modified_base 23: mod_base = OTHER; note = 2'-O-methylcytidine
tttttctccactgcaatgcatac

SEQ ID NO: 4726 - RNA, 23 nt, synthetic construct
  source 1..23: mol_type = other RNA
  modified_base 1: mod_base = OTHER; note = 2'-O-methyluridine-3'-phosphate 5'phosphate
  modified_base 2: mod_base = OTHER; note = 2'-deoxy-2'-fluoroguanosine-3'-phosphate
  modified_base 3: mod_base = OTHER; note = 2'-O-methyluridine-3'-phosphate
  modified_base 4: mod_base = OTHER; note = 2'-O-methyluridine-3'-phosphate
  modified_base 5: mod_base = OTHER; note = 2'-O-methyluridine-3'-phosphate
  modified_base 6: mod_base = OTHER; note = 2'-deoxy-2'-fluorouridine-3'-phosphate
  modified_base 7: mod_base = OTHER; note = 2'-O-methylcytidine-3'-phosphate
  modified_base 8: mod_base = OTHER; note = 2'-O-methyluridine-3'-phosphate
  modified_base 9: mod_base = OTHER; note = 2'-O-methylcytidine-3'-phosphate
  modified_base 10: mod_base = OTHER; note = 2'-O-methylcytidine-3'-phosphate
  modified_base 11: mod_base = OTHER; note = 2'-O-methyladenosine-3'-phosphate
  modified_base 12: mod_base = OTHER; note = 2'-O-methylcytidine-3'-phosphate
  modified_base 13: mod_base = OTHER; note = 2'-O-methyluridine-3'-phosphate
  modified_base 14: mod_base = OTHER; note = 2'-deoxy-2'-fluoroguanosine-3'-phosphate
  modified_base 15: mod_base = OTHER; note = 2'-O-methylcytidine-3'-phosphate
  modified_base 16: mod_base = OTHER; note = 2'-deoxy-2'-fluoroadenosine-3'-phosphate
  modified_base 17: mod_base = OTHER; note = 2'-O-methyladenosine-3'-phosphate
  modified_base 18: mod_base = OTHER; note = 2'-O-methyluridine-3'-phosphate
  modified_base 19: mod_base = OTHER; note = 2'-O-methylguanosine-3'-phosphate
  modified_base 20: mod_base = OTHER; note = 2'-O-methylcytidine-3'-phosphate
  modified_base 21: mod_base = OTHER; note = 2'-O-methyladenosine-3'-phosphate
  modified_base 22: mod_base = OTHER; note = 2'-O-methyluridine-3'-phosphate
  modified_base 23: mod_base = OTHER; note = 2'-O-methyladenosine
tgttttctccactgcaatgcata

SEQ ID NO: 4727 - RNA, 23 nt, synthetic construct
  source 1..23: mol_type = other RNA
  modified_base 1: mod_base = OTHER; note = 2'-O-methyluridine-3'-phosphate 5'phosphate
  modified_base 2: mod_base = OTHER; note = 2'-deoxy-2'-fluoroadenosine-3'-phosphate
  modified_base 3: mod_base = OTHER; note = 2'-O-methylguanosine-3'-phosphate
  modified_base 4: mod_base = OTHER; note = 2'-O-methyluridine-3'-phosphate
  modified_base 5: mod_base = OTHER; note = 2'-O-methyluridine-3'-phosphate
  modified_base 6: mod_base = OTHER; note = 2'-deoxy-2'-fluorouridine-3'-phosphate
  modified_base 7: mod_base = OTHER; note = 2'-O-methyluridine-3'-phosphate
  modified_base 8: mod_base = OTHER; note = 2'-O-methylcytidine-3'-phosphate
  modified_base 9: mod_base = OTHER; note = 2'-O-methyluridine-3'-phosphate
  modified_base 10: mod_base = OTHER; note = 2'-O-methylcytidine-3'-phosphate
  modified_base 11: mod_base = OTHER; note = 2'-O-methylcytidine-3'-phosphate
  modified_base 12: mod_base = OTHER; note = 2'-O-methyladenosine-3'-phosphate
  modified_base 13: mod_base = OTHER; note = 2'-O-methylcytidine-3'-phosphate
  modified_base 14: mod_base = OTHER; note = 2'-deoxy-2'-fluorouridine-3'-phosphate
  modified_base 15: mod_base = OTHER; note = 2'-O-methylguanosine-3'-phosphate
  modified_base 16: mod_base = OTHER; note = 2'-deoxy-2'-fluorocytidine-3'-phosphate
  modified_base 17: mod_base = OTHER; note = 2'-O-methyladenosine-3'-phosphate
  modified_base 18: mod_base = OTHER; note = 2'-O-methyladenosine-3'-phosphate
  modified_base 19: mod_base = OTHER; note = 2'-O-methyluridine-3'-phosphate
  modified_base 20: mod_base = OTHER; note = 2'-O-methylguanosine-3'-phosphate
  modified_base 21: mod_base = OTHER; note = 2'-O-methylcytidine-3'-phosphate
  modified_base 22: mod_base = OTHER; note = 2'-O-methyladenosine-3'-phosphate
  modified_base 23: mod_base = OTHER; note = 2'-O-methyluridine
tagttttctccactgcaatgcat

SEQ ID NO: 4728 - RNA, 23 nt, synthetic construct
  source 1..23: mol_type = other RNA
  modified_base 1: mod_base = OTHER; note = 2'-O-methyluridine-3'-phosphate 5'phosphate
  modified_base 2: mod_base = OTHER; note = 2'-deoxy-2'-fluorouridine-3'-phosphate
  modified_base 3: mod_base = OTHER; note = 2'-O-methyladenosine-3'-phosphate
  modified_base 4: mod_base = OTHER; note = 2'-O-methylguanosine-3'-phosphate
  modified_base 5: mod_base = OTHER; note = 2'-O-methyluridine-3'-phosphate
  modified_base 6: mod_base = OTHER; note = 2'-deoxy-2'-fluorouridine-3'-phosphate
  modified_base 7: mod_base = OTHER; note = 2'-O-methyluridine-3'-phosphate
  modified_base 8: mod_base = OTHER; note = 2'-O-methyluridine-3'-phosphate
  modified_base 9: mod_base = OTHER; note = 2'-O-methylcytidine-3'-phosphate
  modified_base 10: mod_base = OTHER; note = 2'-O-methyluridine-3'-phosphate
  modified_base 11: mod_base = OTHER; note = 2'-O-methylcytidine-3'-phosphate
  modified_base 12: mod_base = OTHER; note = 2'-O-methylcytidine-3'-phosphate
  modified_base 13: mod_base = OTHER; note = 2'-O-methyladenosine-3'-phosphate
  modified_base 14: mod_base = OTHER; note = 2'-deoxy-2'-fluorocytidine-3'-phosphate
  modified_base 15: mod_base = OTHER; note = 2'-O-methyluridine-3'-phosphate
  modified_base 16: mod_base = OTHER; note = 2'-deoxy-2'-fluoroguanosine-3'-phosphate
  modified_base 17: mod_base = OTHER; note = 2'-O-methylcytidine-3'-phosphate
  modified_base 18: mod_base = OTHER; note = 2'-O-methyladenosine-3'-phosphate
  modified_base 19: mod_base = OTHER; note = 2'-O-methyladenosine-3'-phosphate
  modified_base 20: mod_base = OTHER; note = 2'-O-methyluridine-3'-phosphate
  modified_base 21: mod_base = OTHER; note = 2'-O-methylguanosine-3'-phosphate
  modified_base 22: mod_base = OTHER; note = 2'-O-methylcytidine-3'-phosphate
  modified_base 23: mod_base = OTHER; note = 2'-O-methyladenosine
ttagttttctccactgcaatgca

SEQ ID NO: 4729 - RNA, 23 nt, synthetic construct
  source 1..23: mol_type = other RNA
  modified_base 1: mod_base = OTHER; note = 2'-O-methyluridine-3'-phosphate 5'phosphate
  modified_base 2: mod_base = OTHER; note = 2'-deoxy-2'-fluoroadenosine-3'-phosphate
  modified_base 3: mod_base = OTHER; note = 2'-O-methyluridine-3'-phosphate
  modified_base 4: mod_base = OTHER; note = 2'-O-methyladenosine-3'-phosphate
  modified_base 5: mod_base = OTHER; note = 2'-O-methylguanosine-3'-phosphate
  modified_base 6: mod_base = OTHER; note = 2'-deoxy-2'-fluorouridine-3'-phosphate
  modified_base 7: mod_base = OTHER; note = 2'-O-methyluridine-3'-phosphate
  modified_base 8: mod_base = OTHER; note = 2'-O-methyluridine-3'-phosphate
  modified_base 9: mod_base = OTHER; note = 2'-O-methyluridine-3'-phosphate
  modified_base 10: mod_base = OTHER; note = 2'-O-methylcytidine-3'-phosphate
  modified_base 11: mod_base = OTHER; note = 2'-O-methyluridine-3'-phosphate
  modified_base 12: mod_base = OTHER; note = 2'-O-methylcytidine-3'-phosphate
  modified_base 13: mod_base = OTHER; note = 2'-O-methylcytidine-3'-phosphate
  modified_base 14: mod_base = OTHER; note = 2'-deoxy-2'-fluoroadenosine-3'-phosphate
  modified_base 15: mod_base = OTHER; note = 2'-O-methylcytidine-3'-phosphate
  modified_base 16: mod_base = OTHER; note = 2'-deoxy-2'-fluorouridine-3'-phosphate
  modified_base 17: mod_base = OTHER; note = 2'-O-methylguanosine-3'-phosphate
  modified_base 18: mod_base = OTHER; note = 2'-O-methylcytidine-3'-phosphate
  modified_base 19: mod_base = OTHER; note = 2'-O-methyladenosine-3'-phosphate
  modified_base 20: mod_base = OTHER; note = 2'-O-methyladenosine-3'-phosphate
  modified_base 21: mod_base = OTHER; note = 2'-O-methyluridine-3'-phosphate
  modified_base 22: mod_base = OTHER; note = 2'-O-methylguanosine-3'-phosphate
  modified_base 23: mod_base = OTHER; note = 2'-O-methylcytidine
tatagttttctccactgcaatgc

SEQ ID NO: 4730 - RNA, 23 nt, synthetic construct
  source 1..23: mol_type = other RNA
  modified_base 1: mod_base = OTHER; note = 2'-O-methyluridine-3'-phosphate 5'phosphate
  modified_base 2: mod_base = OTHER; note = 2'-deoxy-2'-fluorocytidine-3'-phosphate
  modified_base 3: mod_base = OTHER; note = 2'-O-methyladenosine-3'-phosphate
  modified_base 4: mod_base = OTHER; note = 2'-O-methyluridine-3'-phosphate
  modified_base 5: mod_base = OTHER; note = 2'-O-methyladenosine-3'-phosphate
  modified_base 6: mod_base = OTHER; note = 2'-deoxy-2'-fluoroguanosine-3'-phosphate
  modified_base 7: mod_base = OTHER; note = 2'-O-methyluridine-3'-phosphate
  modified_base 8: mod_base = OTHER; note = 2'-O-methyluridine-3'-phosphate
  modified_base 9: mod_base = OTHER; note = 2'-O-methyluridine-3'-phosphate
  modified_base 10: mod_base = OTHER; note = 2'-O-methyluridine-3'-phosphate
  modified_base 11: mod_base = OTHER; note = 2'-O-methylcytidine-3'-phosphate
  modified_base 12: mod_base = OTHER; note = 2'-O-methyluridine-3'-phosphate
  modified_base 13: mod_base = OTHER; note = 2'-O-methylcytidine-3'-phosphate
  modified_base 14: mod_base = OTHER; note = 2'-deoxy-2'-fluorocytidine-3'-phosphate
  modified_base 15: mod_base = OTHER; note = 2'-O-methyladenosine-3'-phosphate
  modified_base 16: mod_base = OTHER; note = 2'-deoxy-2'-fluorocytidine-3'-phosphate
  modified_base 17: mod_base = OTHER; note = 2'-O-methyluridine-3'-phosphate
  modified_base 18: mod_base = OTHER; note = 2'-O-methylguanosine-3'-phosphate
  modified_base 19: mod_base = OTHER; note = 2'-O-methylcytidine-3'-phosphate
  modified_base 20: mod_base = OTHER; note = 2'-O-methyladenosine-3'-phosphate
  modified_base 21: mod_base = OTHER; note = 2'-O-methyladenosine-3'-phosphate
  modified_base 22: mod_base = OTHER; note = 2'-O-methyluridine-3'-phosphate
  modified_base 23: mod_base = OTHER; note = 2'-O-methylguanosine
tcatagttttctccactgcaatg

SEQ ID NO: 4731 - RNA, 23 nt, synthetic construct
  source 1..23: mol_type = other RNA
  modified_base 1: mod_base = OTHER; note = 2'-O-methyluridine-3'-phosphate 5'phosphate
  modified_base 2: mod_base = OTHER; note = 2'-deoxy-2'-fluorouridine-3'-phosphate
  modified_base 3: mod_base = OTHER; note = 2'-O-methylcytidine-3'-phosphate
  modified_base 4: mod_base = OTHER; note = 2'-O-methyladenosine-3'-phosphate
  modified_base 5: mod_base = OTHER; note = 2'-O-methyluridine-3'-phosphate
  modified_base 6: mod_base = OTHER; note = 2'-deoxy-2'-fluoroadenosine-3'-phosphate
  modified_base 7: mod_base = OTHER; note = 2'-O-methylguanosine-3'-phosphate
  modified_base 8: mod_base = OTHER; note = 2'-O-methyluridine-3'-phosphate
  modified_base 9: mod_base = OTHER; note = 2'-O-methyluridine-3'-phosphate
  modified_base 10: mod_base = OTHER; note = 2'-O-methyluridine-3'-phosphate
  modified_base 11: mod_base = OTHER; note = 2'-O-methyluridine-3'-phosphate
  modified_base 12: mod_base = OTHER; note = 2'-O-methylcytidine-3'-phosphate
  modified_base 13: mod_base = OTHER; note = 2'-O-methyluridine-3'-phosphate
  modified_base 14: mod_base = OTHER; note = 2'-deoxy-2'-fluorocytidine-3'-phosphate
  modified_base 15: mod_base = OTHER; note = 2'-O-methylcytidine-3'-phosphate
  modified_base 16: mod_base = OTHER; note = 2'-deoxy-2'-fluoroadenosine-3'-phosphate
  modified_base 17: mod_base = OTHER; note = 2'-O-methylcytidine-3'-phosphate
  modified_base 18: mod_base = OTHER; note = 2'-O-methyluridine-3'-phosphate
  modified_base 19: mod_base = OTHER; note = 2'-O-methylguanosine-3'-phosphate
  modified_base 20: mod_base = OTHER; note = 2'-O-methylcytidine-3'-phosphate
  modified_base 21: mod_base = OTHER; note = 2'-O-methyladenosine-3'-phosphate
  modified_base 22: mod_base = OTHER; note = 2'-O-methyladenosine-3'-phosphate
  modified_base 23: mod_base = OTHER; note = 2'-O-methyluridine
ttcatagttttctccactgcaat

SEQ ID NO: 4732 - RNA, 23 nt, synthetic construct
  source 1..23: mol_type = other RNA
  modified_base 1: mod_base = OTHER; note = 2'-O-methyluridine-3'-phosphate 5'phosphate
  modified_base 2: mod_base = OTHER; note = 2'-deoxy-2'-fluoroguanosine-3'-phosphate
  modified_base 3: mod_base = OTHER; note = 2'-O-methylguanosine-3'-phosphate
  modified_base 4: mod_base = OTHER; note = 2'-O-methyluridine-3'-phosphate
  modified_base 5: mod_base = OTHER; note = 2'-O-methylcytidine-3'-phosphate
  modified_base 6: mod_base = OTHER; note = 2'-deoxy-2'-fluorouridine-3'-phosphate
  modified_base 7: mod_base = OTHER; note = 2'-O-methyluridine-3'-phosphate
  modified_base 8: mod_base = OTHER; note = 2'-O-methylguanosine-3'-phosphate
  modified_base 9: mod_base = OTHER; note = 2'-O-methylguanosine-3'-phosphate
  modified_base 10: mod_base = OTHER; note = 2'-O-methyladenosine-3'-phosphate
  modified_base 11: mod_base = OTHER; note = 2'-O-methyladenosine-3'-phosphate
  modified_base 12: mod_base = OTHER; note = 2'-O-methyladenosine-3'-phosphate
  modified_base 13: mod_base = OTHER; note = 2'-O-methyluridine-3'-phosphate
  modified_base 14: mod_base = OTHER; note = 2'-deoxy-2'-fluorouridine-3'-phosphate
  modified_base 15: mod_base = OTHER; note = 2'-O-methyluridine-3'-phosphate
  modified_base 16: mod_base = OTHER; note = 2'-deoxy-2'-fluorouridine-3'-phosphate
  modified_base 17: mod_base = OTHER; note = 2'-O-methylguanosine-3'-phosphate
  modified_base 18: mod_base = OTHER; note = 2'-O-methylcytidine-3'-phosphate
  modified_base 19: mod_base = OTHER; note = 2'-O-methylcytidine-3'-phosphate
  modified_base 20: mod_base = OTHER; note = 2'-O-methylguanosine-3'-phosphate
  modified_base 21: mod_base = OTHER; note = 2'-O-methyluridine-3'-phosphate
  modified_base 22: mod_base = OTHER; note = 2'-O-methylcytidine-3'-phosphate
  modified_base 23: mod_base = OTHER; note = 2'-O-methyladenosine
tggtcttggaaattttgccgtca

SEQ ID NO: 4733 - RNA, 23 nt, synthetic construct
  source 1..23: mol_type = other RNA
  modified_base 1: mod_base = OTHER; note = 2'-O-methyluridine-3'-phosphate 5'phosphate
  modified_base 2: mod_base = OTHER; note = 2'-deoxy-2'-fluorouridine-3'-phosphate
  modified_base 3: mod_base = OTHER; note = 2'-O-methylguanosine-3'-phosphate
  modified_base 4: mod_base = OTHER; note = 2'-O-methylguanosine-3'-phosphate
  modified_base 5: mod_base = OTHER; note = 2'-O-methyluridine-3'-phosphate
  modified_base 6: mod_base = OTHER; note = 2'-deoxy-2'-fluorocytidine-3'-phosphate
  modified_base 7: mod_base = OTHER; note = 2'-O-methyluridine-3'-phosphate
  modified_base 8: mod_base = OTHER; note = 2'-O-methyluridine-3'-phosphate
  modified_base 9: mod_base = OTHER; note = 2'-O-methylguanosine-3'-phosphate
  modified_base 10: mod_base = OTHER; note = 2'-O-methylguanosine-3'-phosphate
  modified_base 11: mod_base = OTHER; note = 2'-O-methyladenosine-3'-phosphate
  modified_base 12: mod_base = OTHER; note = 2'-O-methyladenosine-3'-phosphate
  modified_base 13: mod_base = OTHER; note = 2'-O-methyladenosine-3'-phosphate
  modified_base 14: mod_base = OTHER; note = 2'-deoxy-2'-fluorouridine-3'-phosphate
  modified_base 15: mod_base = OTHER; note = 2'-O-methyluridine-3'-phosphate
  modified_base 16: mod_base = OTHER; note = 2'-deoxy-2'-fluorouridine-3'-phosphate
  modified_base 17: mod_base = OTHER; note = 2'-O-methyluridine-3'-phosphate
  modified_base 18: mod_base = OTHER; note = 2'-O-methylguanosine-3'-phosphate
  modified_base 19: mod_base = OTHER; note = 2'-O-methylcytidine-3'-phosphate
  modified_base 20: mod_base = OTHER; note = 2'-O-methylcytidine-3'-phosphate
  modified_base 21: mod_base = OTHER; note = 2'-O-methylguanosine-3'-phosphate
  modified_base 22: mod_base = OTHER; note = 2'-O-methyluridine-3'-phosphate
  modified_base 23: mod_base = OTHER; note = 2'-O-methylcytidine
ttggtcttggaaattttgccgtc

SEQ ID NO: 4734 - RNA, 23 nt, synthetic construct
  source 1..23: mol_type = other RNA
  modified_base 1: mod_base = OTHER; note = 2'-O-methyluridine-3'-phosphate 5'phosphate
  modified_base 2: mod_base = OTHER; note = 2'-deoxy-2'-fluoroadenosine-3'-phosphate
  modified_base 3: mod_base = OTHER; note = 2'-O-methyluridine-3'-phosphate
  modified_base 4: mod_base = OTHER; note = 2'-O-methylguanosine-3'-phosphate
  modified_base 5: mod_base = OTHER; note = 2'-O-methylguanosine-3'-phosphate
  modified_base 6: mod_base = OTHER; note = 2'-deoxy-2'-fluorouridine-3'-phosphate
  modified_base 7: mod_base = OTHER; note = 2'-O-methylcytidine-3'-phosphate
  modified_base 8: mod_base = OTHER; note = 2'-O-methyluridine-3'-phosphate
  modified_base 9: mod_base = OTHER; note = 2'-O-methyluridine-3'-phosphate
  modified_base 10: mod_base = OTHER; note = 2'-O-methylguanosine-3'-phosphate
  modified_base 11: mod_base = OTHER; note = 2'-O-methylguanosine-3'-phosphate
  modified_base 12: mod_base = OTHER; note = 2'-O-methyladenosine-3'-phosphate
  modified_base 13: mod_base = OTHER; note = 2'-O-methyladenosine-3'-phosphate
  modified_base 14: mod_base = OTHER; note = 2'-deoxy-2'-fluoroadenosine-3'-phosphate
  modified_base 15: mod_base = OTHER; note = 2'-O-methyluridine-3'-phosphate
  modified_base 16: mod_base = OTHER; note = 2'-deoxy-2'-fluorouridine-3'-phosphate
  modified_base 17: mod_base = OTHER; note = 2'-O-methyluridine-3'-phosphate
  modified_base 18: mod_base = OTHER; note = 2'-O-methyluridine-3'-phosphate
  modified_base 19: mod_base = OTHER; note = 2'-O-methylguanosine-3'-phosphate
  modified_base 20: mod_base = OTHER; note = 2'-O-methylcytidine-3'-phosphate
  modified_base 21: mod_base = OTHER; note = 2'-O-methylcytidine-3'-phosphate
  modified_base 22: mod_base = OTHER; note = 2'-O-methylguanosine-3'-phosphate
  modified_base 23: mod_base = OTHER; note = 2'-O-methyluridine
tatggtcttggaaattttgccgt

SEQ ID NO: 4735 - RNA, 23 nt, synthetic construct
  source 1..23: mol_type = other RNA
  modified_base 1: mod_base = OTHER; note = 2'-O-methyluridine-3'-phosphate 5'phosphate
  modified_base 2: mod_base = OTHER; note = 2'-deoxy-2'-fluorocytidine-3'-phosphate
  modified_base 3: mod_base = OTHER; note = 2'-O-methyladenosine-3'-phosphate
  modified_base 4: mod_base = OTHER; note = 2'-O-methyluridine-3'-phosphate
  modified_base 5: mod_base = OTHER; note = 2'-O-methylguanosine-3'-phosphate
  modified_base 6: mod_base = OTHER; note = 2'-deoxy-2'-fluoroguanosine-3'-phosphate
  modified_base 7: mod_base = OTHER; note = 2'-O-methyluridine-3'-phosphate
  modified_base 8: mod_base = OTHER; note = 2'-O-methylcytidine-3'-phosphate
  modified_base 9: mod_base = OTHER; note = 2'-O-methyluridine-3'-phosphate
  modified_base 10: mod_base = OTHER; note = 2'-O-methyluridine-3'-phosphate
  modified_base 11: mod_base = OTHER; note = 2'-O-methylguanosine-3'-phosphate
  modified_base 12: mod_base = OTHER; note = 2'-O-methylguanosine-3'-phosphate
  modified_base 13: mod_base = OTHER; note = 2'-O-methyladenosine-3'-phosphate
  modified_base 14: mod_base = OTHER; note = 2'-deoxy-2'-fluoroadenosine-3'-phosphate
  modified_base 15: mod_base = OTHER; note = 2'-O-methyladenosine-3'-phosphate
  modified_base 16: mod_base = OTHER; note = 2'-deoxy-2'-fluorouridine-3'-phosphate
  modified_base 17: mod_base = OTHER; note = 2'-O-methyluridine-3'-phosphate
  modified_base 18: mod_base = OTHER; note = 2'-O-methyluridine-3'-phosphate
  modified_base 19: mod_base = OTHER; note = 2'-O-methyluridine-3'-phosphate
  modified_base 20: mod_base = OTHER; note = 2'-O-methylguanosine-3'-phosphate
  modified_base 21: mod_base = OTHER; note = 2'-O-methylcytidine-3'-phosphate
  modified_base 22: mod_base = OTHER; note = 2'-O-methylcytidine-3'-phosphate
  modified_base 23: mod_base = OTHER; note = 2'-O-methylguanosine
tcatggtcttggaaattttgccg

SEQ ID NO: 4736 - RNA, 23 nt, synthetic construct
  source 1..23: mol_type = other RNA
  modified_base 1: mod_base = OTHER; note = 2'-O-methyluridine-3'-phosphate 5'phosphate
  modified_base 2: mod_base = OTHER; note = 2'-deoxy-2'-fluoroadenosine-3'-phosphate
  modified_base 3: mod_base = OTHER; note = 2'-O-methylcytidine-3'-phosphate
  modified_base 4: mod_base = OTHER; note = 2'-O-methyladenosine-3'-phosphate
  modified_base 5: mod_base = OTHER; note = 2'-O-methyluridine-3'-phosphate
  modified_base 6: mod_base = OTHER; note = 2'-deoxy-2'-fluoroguanosine-3'-phosphate
  modified_base 7: mod_base = OTHER; note = 2'-O-methylguanosine-3'-phosphate
  modified_base 8: mod_base = OTHER; note = 2'-O-methyluridine-3'-phosphate
  modified_base 9: mod_base = OTHER; note = 2'-O-methylcytidine-3'-phosphate
  modified_base 10: mod_base = OTHER; note = 2'-O-methyluridine-3'-phosphate
  modified_base 11: mod_base = OTHER; note = 2'-O-methyluridine-3'-phosphate
  modified_base 12: mod_base = OTHER; note = 2'-O-methylguanosine-3'-phosphate
  modified_base 13: mod_base = OTHER; note = 2'-O-methylguanosine-3'-phosphate
  modified_base 14: mod_base = OTHER; note = 2'-deoxy-2'-fluoroadenosine-3'-phosphate
  modified_base 15: mod_base = OTHER; note = 2'-O-methyladenosine-3'-phosphate
  modified_base 16: mod_base = OTHER; note = 2'-deoxy-2'-fluoroadenosine-3'-phosphate
  modified_base 17: mod_base = OTHER; note = 2'-O-methyluridine-3'-phosphate
  modified_base 18: mod_base = OTHER; note = 2'-O-methyluridine-3'-phosphate
  modified_base 19: mod_base = OTHER; note = 2'-O-methyluridine-3'-phosphate
  modified_base 20: mod_base = OTHER; note = 2'-O-methyluridine-3'-phosphate
  modified_base 21: mod_base = OTHER; note = 2'-O-methylguanosine-3'-phosphate
  modified_base 22: mod_base = OTHER; note = 2'-O-methylcytidine-3'-phosphate
  modified_base 23: mod_base = OTHER; note = 2'-O-methylcytidine
tacatggtcttggaaattttgcc

SEQ ID NO: 4737 - RNA, 23 nt, synthetic construct
  source 1..23: mol_type = other RNA
  modified_base 1: mod_base = OTHER; note = 2'-O-methyluridine-3'-phosphate 5'phosphate
  modified_base 2: mod_base = OTHER; note = 2'-deoxy-2'-fluoroguanosine-3'-phosphate
  modified_base 3: mod_base = OTHER; note = 2'-O-methyladenosine-3'-phosphate
  modified_base 4: mod_base = OTHER; note = 2'-O-methylcytidine-3'-phosphate
  modified_base 5: mod_base = OTHER; note = 2'-O-methyladenosine-3'-phosphate
  modified_base 6: mod_base = OTHER; note = 2'-deoxy-2'-fluorouridine-3'-phosphate
  modified_base 7: mod_base = OTHER; note = 2'-O-methylguanosine-3'-phosphate
  modified_base 8: mod_base = OTHER; note = 2'-O-methylguanosine-3'-phosphate
  modified_base 9: mod_base = OTHER; note = 2'-O-methyluridine-3'-phosphate
  modified_base 10: mod_base = OTHER; note = 2'-O-methylcytidine-3'-phosphate
  modified_base 11: mod_base = OTHER; note = 2'-O-methyluridine-3'-phosphate
  modified_base 12: mod_base = OTHER; note = 2'-O-methyluridine-3'-phosphate
  modified_base 13: mod_base = OTHER; note = 2'-O-methylguanosine-3'-phosphate
  modified_base 14: mod_base = OTHER; note = 2'-deoxy-2'-fluoroguanosine-3'-phosphate
  modified_base 15: mod_base = OTHER; note = 2'-O-methyladenosine-3'-phosphate
  modified_base 16: mod_base = OTHER; note = 2'-deoxy-2'-fluoroadenosine-3'-phosphate
  modified_base 17: mod_base = OTHER; note = 2'-O-methyladenosine-3'-phosphate
  modified_base 18: mod_base = OTHER; note = 2'-O-methyluridine-3'-phosphate
  modified_base 19: mod_base = OTHER; note = 2'-O-methyluridine-3'-phosphate
  modified_base 20: mod_base = OTHER; note = 2'-O-methyluridine-3'-phosphate
  modified_base 21: mod_base = OTHER; note = 2'-O-methyluridine-3'-phosphate
  modified_base 22: mod_base = OTHER; note = 2'-O-methylguanosine-3'-phosphate
  modified_base 23: mod_base = OTHER; note = 2'-O-methylcytidine
tgacatggtcttggaaattttgc

SEQ ID NO: 4738 - RNA, 23 nt, synthetic construct
  source 1..23: mol_type = other RNA
  modified_base 1: mod_base = OTHER; note = 2'-O-methyluridine-3'-phosphate 5'phosphate
  modified_base 2: mod_base = OTHER; note = 2'-deoxy-2'-fluoroadenosine-3'-phosphate
  modified_base 3: mod_base = OTHER; note = 2'-O-methylguanosine-3'-phosphate
  modified_base 4: mod_base = OTHER; note = 2'-O-methyladenosine-3'-phosphate
  modified_base 5: mod_base = OTHER; note = 2'-O-methylcytidine-3'-phosphate
  modified_base 6: mod_base = OTHER; note = 2'-deoxy-2'-fluoroadenosine-3'-phosphate
  modified_base 7: mod_base = OTHER; note = 2'-O-methyluridine-3'-phosphate
  modified_base 8: mod_base = OTHER; note = 2'-O-methylguanosine-3'-phosphate
  modified_base 9: mod_base = OTHER; note = 2'-O-methylguanosine-3'-phosphate
  modified_base 10: mod_base = OTHER; note = 2'-O-methyluridine-3'-phosphate
  modified_base 11: mod_base = OTHER; note = 2'-O-methylcytidine-3'-phosphate
  modified_base 12: mod_base = OTHER; note = 2'-O-methyluridine-3'-phosphate
  modified_base 13: mod_base = OTHER; note = 2'-O-methyluridine-3'-phosphate
  modified_base 14: mod_base = OTHER; note = 2'-deoxy-2'-fluoroguanosine-3'-phosphate
  modified_base 15: mod_base = OTHER; note = 2'-O-methylguanosine-3'-phosphate
  modified_base 16: mod_base = OTHER; note = 2'-deoxy-2'-fluoroadenosine-3'-phosphate
  modified_base 17: mod_base = OTHER; note = 2'-O-methyladenosine-3'-phosphate
  modified_base 18: mod_base = OTHER; note = 2'-O-methyladenosine-3'-phosphate
  modified_base 19: mod_base = OTHER; note = 2'-O-methyluridine-3'-phosphate
  modified_base 20: mod_base = OTHER; note = 2'-O-methyluridine-3'-phosphate
  modified_base 21: mod_base = OTHER; note = 2'-O-methyluridine-3'-phosphate
  modified_base 22: mod_base = OTHER; note = 2'-O-methyluridine-3'-phosphate
  modified_base 23: mod_base = OTHER; note = 2'-O-methylguanosine
tagacatggtcttggaaattttg

SEQ ID NO: 4739 - RNA, 23 nt, synthetic construct
  source 1..23: mol_type = other RNA
  modified_base 1: mod_base = OTHER; note = 2'-O-methyluridine-3'-phosphate 5'phosphate
  modified_base 2: mod_base = OTHER; note = 2'-deoxy-2'-fluorocytidine-3'-phosphate
  modified_base 3: mod_base = OTHER; note = 2'-O-methyladenosine-3'-phosphate
  modified_base 4: mod_base = OTHER; note = 2'-O-methylguanosine-3'-phosphate
  modified_base 5: mod_base = OTHER; note = 2'-O-methyladenosine-3'-phosphate
  modified_base 6: mod_base = OTHER; note = 2'-deoxy-2'-fluorocytidine-3'-phosphate
  modified_base 7: mod_base = OTHER; note = 2'-O-methyladenosine-3'-phosphate
  modified_base 8: mod_base = OTHER; note = 2'-O-methyluridine-3'-phosphate
  modified_base 9: mod_base = OTHER; note = 2'-O-methylguanosine-3'-phosphate
  modified_base 10: mod_base = OTHER; note = 2'-O-methylguanosine-3'-phosphate
  modified_base 11: mod_base = OTHER; note = 2'-O-methyluridine-3'-phosphate
  modified_base 12: mod_base = OTHER; note = 2'-O-methylcytidine-3'-phosphate
  modified_base 13: mod_base = OTHER; note = 2'-O-methyluridine-3'-phosphate
  modified_base 14: mod_base = OTHER; note = 2'-deoxy-2'-fluorouridine-3'-phosphate
  modified_base 15: mod_base = OTHER; note = 2'-O-methylguanosine-3'-phosphate
  modified_base 16: mod_base = OTHER; note = 2'-deoxy-2'-fluoroguanosine-3'-phosphate
  modified_base 17: mod_base = OTHER; note = 2'-O-methyladenosine-3'-phosphate
  modified_base 18: mod_base = OTHER; note = 2'-O-methyladenosine-3'-phosphate
  modified_base 19: mod_base = OTHER; note = 2'-O-methyladenosine-3'-phosphate
  modified_base 20: mod_base = OTHER; note = 2'-O-methyluridine-3'-phosphate
  modified_base 21: mod_base = OTHER; note = 2'-O-methyluridine-3'-phosphate
  modified_base 22: mod_base = OTHER; note = 2'-O-methyluridine-3'-phosphate
  modified_base 23: mod_base = OTHER; note = 2'-O-methyluridine
tcagacatggtcttggaaatttt

SEQ ID NO: 4740 - RNA, 23 nt, synthetic construct
  source 1..23: mol_type = other RNA
  modified_base 1: mod_base = OTHER; note = 2'-O-methyluridine-3'-phosphate 5'phosphate
  modified_base 2: mod_base = OTHER; note = 2'-deoxy-2'-fluorocytidine-3'-phosphate
  modified_base 3: mod_base = OTHER; note = 2'-O-methylcytidine-3'-phosphate
  modified_base 4: mod_base = OTHER; note = 2'-O-methyladenosine-3'-phosphate
  modified_base 5: mod_base = OTHER; note = 2'-O-methylguanosine-3'-phosphate
  modified_base 6: mod_base = OTHER; note = 2'-deoxy-2'-fluoroadenosine-3'-phosphate
  modified_base 7: mod_base = OTHER; note = 2'-O-methylcytidine-3'-phosphate
  modified_base 8: mod_base = OTHER; note = 2'-O-methyladenosine-3'-phosphate
  modified_base 9: mod_base = OTHER; note = 2'-O-methyluridine-3'-phosphate
  modified_base 10: mod_base = OTHER; note = 2'-O-methylguanosine-3'-phosphate
  modified_base 11: mod_base = OTHER; note = 2'-O-methylguanosine-3'-phosphate
  modified_base 12: mod_base = OTHER; note = 2'-O-methyluridine-3'-phosphate
  modified_base 13: mod_base = OTHER; note = 2'-O-methylcytidine-3'-phosphate
  modified_base 14: mod_base = OTHER; note = 2'-deoxy-2'-fluorouridine-3'-phosphate
  modified_base 15: mod_base = OTHER; note = 2'-O-methyluridine-3'-phosphate
  modified_base 16: mod_base = OTHER; note = 2'-deoxy-2'-fluoroguanosine-3'-phosphate
  modified_base 17: mod_base = OTHER; note = 2'-O-methylguanosine-3'-phosphate
  modified_base 18: mod_base = OTHER; note = 2'-O-methyladenosine-3'-phosphate
  modified_base 19: mod_base = OTHER; note = 2'-O-methyladenosine-3'-phosphate
  modified_base 20: mod_base = OTHER; note = 2'-O-methyladenosine-3'-phosphate
  modified_base 21: mod_base = OTHER; note = 2'-O-methyluridine-3'-phosphate
  modified_base 22: mod_base = OTHER; note = 2'-O-methyluridine-3'-phosphate
  modified_base 23: mod_base = OTHER; note = 2'-O-methyluridine
tccagacatggtcttggaaattt

SEQ ID NO: 4741 - RNA, 23 nt, synthetic construct
  source 1..23: mol_type = other RNA
  modified_base 1: mod_base = OTHER; note = 2'-O-methyluridine-3'-phosphate 5'phosphate
  modified_base 2: mod_base = OTHER; note = 2'-deoxy-2'-fluorouridine-3'-phosphate
  modified_base 3: mod_base = OTHER; note = 2'-O-methylcytidine-3'-phosphate
  modified_base 4: mod_base = OTHER; note = 2'-O-methylcytidine-3'-phosphate
  modified_base 5: mod_base = OTHER; note = 2'-O-methyladenosine-3'-phosphate
  modified_base 6: mod_base = OTHER; note = 2'-deoxy-2'-fluoroguanosine-3'-phosphate
  modified_base 7: mod_base = OTHER; note = 2'-O-methyladenosine-3'-phosphate
  modified_base 8: mod_base = OTHER; note = 2'-O-methylcytidine-3'-phosphate
  modified_base 9: mod_base = OTHER; note = 2'-O-methyladenosine-3'-phosphate
  modified_base 10: mod_base = OTHER; note = 2'-O-methyluridine-3'-phosphate
  modified_base 11: mod_base = OTHER; note = 2'-O-methylguanosine-3'-phosphate
  modified_base 12: mod_base = OTHER; note = 2'-O-methylguanosine-3'-phosphate
  modified_base 13: mod_base = OTHER; note = 2'-O-methyluridine-3'-phosphate
  modified_base 14: mod_base = OTHER; note = 2'-deoxy-2'-fluorocytidine-3'-phosphate
  modified_base 15: mod_base = OTHER; note = 2'-O-methyluridine-3'-phosphate
  modified_base 16: mod_base = OTHER; note = 2'-deoxy-2'-fluorouridine-3'-phosphate
  modified_base 17: mod_base = OTHER; note = 2'-O-methylguanosine-3'-phosphate
  modified_base 18: mod_base = OTHER; note = 2'-O-methylguanosine-3'-phosphate
  modified_base 19: mod_base = OTHER; note = 2'-O-methyladenosine-3'-phosphate
  modified_base 20: mod_base = OTHER; note = 2'-O-methyladenosine-3'-phosphate
  modified_base 21: mod_base = OTHER; note = 2'-O-methyladenosine-3'-phosphate
  modified_base 22: mod_base = OTHER; note = 2'-O-methyluridine-3'-phosphate
  modified_base 23: mod_base = OTHER; note = 2'-O-methyluridine
ttccagacatggtcttggaaatt

SEQ ID NO: 4742 - RNA, 23 nt, synthetic construct
  source 1..23: mol_type = other RNA
  modified_base 1: mod_base = OTHER; note = 2'-O-methyluridine-3'-phosphate 5'phosphate
  modified_base 2: mod_base = OTHER; note = 2'-deoxy-2'-fluoroadenosine-3'-phosphate
  modified_base 3: mod_base = OTHER; note = 2'-O-methylguanosine-3'-phosphate
  modified_base 4: mod_base = OTHER; note = 2'-O-methyladenosine-3'-phosphate
  modified_base 5: mod_base = OTHER; note = 2'-O-methylguanosine-3'-phosphate
  modified_base 6: mod_base = OTHER; note = 2'-deoxy-2'-fluorouridine-3'-phosphate
  modified_base 7: mod_base = OTHER; note = 2'-O-methylcytidine-3'-phosphate
  modified_base 8: mod_base = OTHER; note = 2'-O-methylcytidine-3'-phosphate
  modified_base 9: mod_base = OTHER; note = 2'-O-methylcytidine-3'-phosphate
  modified_base 10: mod_base = OTHER; note = 2'-O-methyladenosine-3'-phosphate
  modified_base 11: mod_base = OTHER; note = 2'-O-methylguanosine-3'-phosphate
  modified_base 12: mod_base = OTHER; note = 2'-O-methylguanosine-3'-phosphate
  modified_base 13: mod_base = OTHER; note = 2'-O-methylcytidine-3'-phosphate
  modified_base 14: mod_base = OTHER; note = 2'-deoxy-2'-fluorocytidine-3'-phosphate
  modified_base 15: mod_base = OTHER; note = 2'-O-methyluridine-3'-phosphate
  modified_base 16: mod_base = OTHER; note = 2'-deoxy-2'-fluoroguanosine-3'-phosphate
  modified_base 17: mod_base = OTHER; note = 2'-O-methylguanosine-3'-phosphate
  modified_base 18: mod_base = OTHER; note = 2'-O-methylcytidine-3'-phosphate
  modified_base 19: mod_base = OTHER; note = 2'-O-methyladenosine-3'-phosphate
  modified_base 20: mod_base = OTHER; note = 2'-O-methyluridine-3'-phosphate
  modified_base 21: mod_base = OTHER; note = 2'-O-methyluridine-3'-phosphate
  modified_base 22: mod_base = OTHER; note = 2'-O-methylcytidine-3'-phosphate
  modified_base 23: mod_base = OTHER; note = 2'-O-methylcytidine
tagagtcccaggcctggcattcc

SEQ ID NO: 4743 - RNA, 23 nt, synthetic construct
  source 1..23: mol_type = other RNA
  modified_base 1: mod_base = OTHER; note = 2'-O-methyluridine-3'-phosphate 5'phosphate
  modified_base 2: mod_base = OTHER; note = 2'-deoxy-2'-fluorocytidine-3'-phosphate
  modified_base 3: mod_base = OTHER; note = 2'-O-methyluridine-3'-phosphate
  modified_base 4: mod_base = OTHER; note = 2'-O-methylguanosine-3'-phosphate
  modified_base 5: mod_base = OTHER; note = 2'-O-methyladenosine-3'-phosphate
  modified_base 6: mod_base = OTHER; note = 2'-deoxy-2'-fluoroguanosine-3'-phosphate
  modified_base 7: mod_base = OTHER; note = 2'-O-methyladenosine-3'-phosphate
  modified_base 8: mod_base = OTHER; note = 2'-O-methylguanosine-3'-phosphate
  modified_base 9: mod_base = OTHER; note = 2'-O-methyluridine-3'-phosphate
  modified_base 10: mod_base = OTHER; note = 2'-O-methylcytidine-3'-phosphate
  modified_base 11: mod_base = OTHER; note = 2'-O-methylcytidine-3'-phosphate
  modified_base 12: mod_base = OTHER; note = 2'-O-methylcytidine-3'-phosphate
  modified_base 13: mod_base = OTHER; note = 2'-O-methyladenosine-3'-phosphate
  modified_base 14: mod_base = OTHER; note = 2'-deoxy-2'-fluoroguanosine-3'-phosphate
  modified_base 15: mod_base = OTHER; note = 2'-O-methylguanosine-3'-phosphate
  modified_base 16: mod_base = OTHER; note = 2'-deoxy-2'-fluorocytidine-3'-phosphate
  modified_base 17: mod_base = OTHER; note = 2'-O-methylcytidine-3'-phosphate
  modified_base 18: mod_base = OTHER; note = 2'-O-methyluridine-3'-phosphate
  modified_base 19: mod_base = OTHER; note = 2'-O-methylguanosine-3'-phosphate
  modified_base 20: mod_base = OTHER; note = 2'-O-methylguanosine-3'-phosphate
  modified_base 21: mod_base = OTHER; note = 2'-O-methylcytidine-3'-phosphate
  modified_base 22: mod_base = OTHER; note = 2'-O-methyladenosine-3'-phosphate
  modified_base 23: mod_base = OTHER; note = 2'-O-methyluridine
tctgagagtcccaggcctggcat

SEQ ID NO: 4744 - RNA, 23 nt, synthetic construct
  source 1..23: mol_type = other RNA
  modified_base 1: mod_base = OTHER; note = 2'-O-methyluridine-3'-phosphate 5'phosphate
  modified_base 2: mod_base = OTHER; note = 2'-deoxy-2'-fluorouridine-3'-phosphate
  modified_base 3: mod_base = OTHER; note = 2'-O-methylcytidine-3'-phosphate
  modified_base 4: mod_base = OTHER; note = 2'-O-methyluridine-3'-phosphate
  modified_base 5: mod_base = OTHER; note = 2'-O-methylguanosine-3'-phosphate
  modified_base 6: mod_base = OTHER; note = 2'-deoxy-2'-fluoroadenosine-3'-phosphate
  modified_base 7: mod_base = OTHER; note = 2'-O-methylguanosine-3'-phosphate
  modified_base 8: mod_base = OTHER; note = 2'-O-methyladenosine-3'-phosphate
  modified_base 9: mod_base = OTHER; note = 2'-O-methylguanosine-3'-phosphate
  modified_base 10: mod_base = OTHER; note = 2'-O-methyluridine-3'-phosphate
  modified_base 11: mod_base = OTHER; note = 2'-O-methylcytidine-3'-phosphate
  modified_base 12: mod_base = OTHER; note = 2'-O-methylcytidine-3'-phosphate
  modified_base 13: mod_base = OTHER; note = 2'-O-methylcytidine-3'-phosphate
  modified_base 14: mod_base = OTHER; note = 2'-deoxy-2'-fluoroadenosine-3'-phosphate
  modified_base 15: mod_base = OTHER; note = 2'-O-methylguanosine-3'-phosphate
  modified_base 16: mod_base = OTHER; note = 2'-deoxy-2'-fluoroguanosine-3'-phosphate
  modified_base 17: mod_base = OTHER; note = 2'-O-methylcytidine-3'-phosphate
  modified_base 18: mod_base = OTHER; note = 2'-O-methylcytidine-3'-phosphate
  modified_base 19: mod_base = OTHER; note = 2'-O-methyluridine-3'-phosphate
  modified_base 20: mod_base = OTHER; note = 2'-O-methylguanosine-3'-phosphate
  modified_base 21: mod_base = OTHER; note = 2'-O-methylguanosine-3'-phosphate
  modified_base 22: mod_base = OTHER; note = 2'-O-methylcytidine-3'-phosphate
  modified_base 23: mod_base = OTHER; note = 2'-O-methyladenosine
ttctgagagtcccaggcctggca

SEQ ID NO: 4745 - RNA, 23 nt, synthetic construct
  source 1..23: mol_type = other RNA
  modified_base 1: mod_base = OTHER; note = 2'-O-methyluridine-3'-phosphate 5'phosphate
  modified_base 2: mod_base = OTHER; note = 2'-deoxy-2'-fluorouridine-3'-phosphate
  modified_base 3: mod_base = OTHER; note = 2'-O-methyladenosine-3'-phosphate
  modified_base 4: mod_base = OTHER; note = 2'-O-methyluridine-3'-phosphate
  modified_base 5: mod_base = OTHER; note = 2'-O-methylcytidine-3'-phosphate
  modified_base 6: mod_base = OTHER; note = 2'-deoxy-2'-fluorocytidine-3'-phosphate
  modified_base 7: mod_base = OTHER; note = 2'-O-methyladenosine-3'-phosphate
  modified_base 8: mod_base = OTHER; note = 2'-O-methyluridine-3'-phosphate
  modified_base 9: mod_base = OTHER; note = 2'-O-methylguanosine-3'-phosphate
  modified_base 10: mod_base = OTHER; note = 2'-O-methyladenosine-3'-phosphate
  modified_base 11: mod_base = OTHER; note = 2'-O-methylguanosine-3'-phosphate
  modified_base 12: mod_base = OTHER; note = 2'-O-methylcytidine-3'-phosphate
  modified_base 13: mod_base = OTHER; note = 2'-O-methylguanosine-3'-phosphate
  modified_base 14: mod_base = OTHER; note = 2'-deoxy-2'-fluorouridine-3'-phosphate
  modified_base 15: mod_base = OTHER; note = 2'-O-methylguanosine-3'-phosphate
  modified_base 16: mod_base = OTHER; note = 2'-deoxy-2'-fluorouridine-3'-phosphate
  modified_base 17: mod_base = OTHER; note = 2'-O-methylguanosine-3'-phosphate
  modified_base 18: mod_base = OTHER; note = 2'-O-methylguanosine-3'-phosphate
  modified_base 19: mod_base = OTHER; note = 2'-O-methylguanosine-3'-phosphate
  modified_base 20: mod_base = OTHER; note = 2'-O-methylcytidine-3'-phosphate
  modified_base 21: mod_base = OTHER; note = 2'-O-methyluridine-3'-phosphate
  modified_base 22: mod_base = OTHER; note = 2'-O-methylcytidine-3'-phosphate
  modified_base 23: mod_base = OTHER; note = 2'-O-methyluridine
ttatccatgagcgtgtgggctct

SEQ ID NO: 4746 - RNA, 23 nt, synthetic construct
  source 1..23: mol_type = other RNA
  modified_base 1: mod_base = OTHER; note = 2'-O-methyluridine-3'-phosphate 5'phosphate
  modified_base 2: mod_base = OTHER; note = 2'-deoxy-2'-fluoroadenosine-3'-phosphate
  modified_base 3: mod_base = OTHER; note = 2'-O-methyluridine-3'-phosphate
  modified_base 4: mod_base = OTHER; note = 2'-O-methylguanosine-3'-phosphate
  modified_base 5: mod_base = OTHER; note = 2'-O-methyluridine-3'-phosphate
  modified_base 6: mod_base = OTHER; note = 2'-deoxy-2'-fluoroadenosine-3'-phosphate
  modified_base 7: mod_base = OTHER; note = 2'-O-methyluridine-3'-phosphate
  modified_base 8: mod_base = OTHER; note = 2'-O-methylcytidine-3'-phosphate
  modified_base 9: mod_base = OTHER; note = 2'-O-methylcytidine-3'-phosphate
  modified_base 10: mod_base = OTHER; note = 2'-O-methyladenosine-3'-phosphate
  modified_base 11: mod_base = OTHER; note = 2'-O-methyluridine-3'-phosphate
  modified_base 12: mod_base = OTHER; note = 2'-O-methylguanosine-3'-phosphate
  modified_base 13: mod_base = OTHER; note = 2'-O-methyladenosine-3'-phosphate
  modified_base 14: mod_base = OTHER; note = 2'-deoxy-2'-fluoroguanosine-3'-phosphate
  modified_base 15: mod_base = OTHER; note = 2'-O-methylcytidine-3'-phosphate
  modified_base 16: mod_base = OTHER; note = 2'-deoxy-2'-fluoroguanosine-3'-phosphate
  modified_base 17: mod_base = OTHER; note = 2'-O-methyluridine-3'-phosphate
  modified_base 18: mod_base = OTHER; note = 2'-O-methylguanosine-3'-phosphate
  modified_base 19: mod_base = OTHER; note = 2'-O-methyluridine-3'-phosphate
  modified_base 20: mod_base = OTHER; note = 2'-O-methylguanosine-3'-phosphate
  modified_base 21: mod_base = OTHER; note = 2'-O-methylguanosine-3'-phosphate
  modified_base 22: mod_base = OTHER; note = 2'-O-methylguanosine-3'-phosphate
  modified_base 23: mod_base = OTHER; note = 2'-O-methylcytidine
tatgtatccatgagcgtgtgggc

SEQ ID NO: 4747 - RNA, 23 nt, synthetic construct
  source 1..23: mol_type = other RNA
  modified_base 1: mod_base = OTHER; note = 2'-O-methyluridine-3'-phosphate 5'phosphate
  modified_base 2: mod_base = OTHER; note = 2'-deoxy-2'-fluoroadenosine-3'-phosphate
  modified_base 3: mod_base = OTHER; note = 2'-O-methyladenosine-3'-phosphate
  modified_base 4: mod_base = OTHER; note = 2'-O-methyluridine-3'-phosphate
  modified_base 5: mod_base = OTHER; note = 2'-O-methylguanosine-3'-phosphate
  modified_base 6: mod_base = OTHER; note = 2'-deoxy-2'-fluorouridine-3'-phosphate
  modified_base 7: mod_base = OTHER; note = 2'-O-methyladenosine-3'-phosphate
  modified_base 8: mod_base = OTHER; note = 2'-O-methyluridine-3'-phosphate
  modified_base 9: mod_base = OTHER; note = 2'-O-methylcytidine-3'-phosphate
  modified_base 10: mod_base = OTHER; note = 2'-O-methylcytidine-3'-phosphate
  modified_base 11: mod_base = OTHER; note = 2'-O-methyladenosine-3'-phosphate
  modified_base 12: mod_base = OTHER; note = 2'-O-methyluridine-3'-phosphate
  modified_base 13: mod_base = OTHER; note = 2'-O-methylguanosine-3'-phosphate
  modified_base 14: mod_base = OTHER; note = 2'-deoxy-2'-fluoroadenosine-3'-phosphate
  modified_base 15: mod_base = OTHER; note = 2'-O-methylguanosine-3'-phosphate
  modified_base 16: mod_base = OTHER; note = 2'-deoxy-2'-fluorocytidine-3'-phosphate
  modified_base 17: mod_base = OTHER; note = 2'-O-methylguanosine-3'-phosphate
  modified_base 18: mod_base = OTHER; note = 2'-O-methyluridine-3'-phosphate
  modified_base 19: mod_base = OTHER; note = 2'-O-methylguanosine-3'-phosphate
  modified_base 20: mod_base = OTHER; note = 2'-O-methyluridine-3'-phosphate
  modified_base 21: mod_base = OTHER; note = 2'-O-methylguanosine-3'-phosphate
  modified_base 22: mod_base = OTHER; note = 2'-O-methylguanosine-3'-phosphate
  modified_base 23: mod_base = OTHER; note = 2'-O-methylguanosine
taatgtatccatgagcgtgtggg

SEQ ID NO: 4748 - RNA, 23 nt, synthetic construct
  source 1..23: mol_type = other RNA
  modified_base 1: mod_base = OTHER; note = 2'-O-methyluridine-3'-phosphate 5'phosphate
  modified_base 2: mod_base = OTHER; note = 2'-deoxy-2'-fluoroadenosine-3'-phosphate
  modified_base 3: mod_base = OTHER; note = 2'-O-methylguanosine-3'-phosphate
  modified_base 4: mod_base = OTHER; note = 2'-O-methylguanosine-3'-phosphate
  modified_base 5: mod_base = OTHER; note = 2'-O-methyladenosine-3'-phosphate
  modified_base 6: mod_base = OTHER; note = 2'-deoxy-2'-fluoroadenosine-3'-phosphate
  modified_base 7: mod_base = OTHER; note = 2'-O-methyluridine-3'-phosphate
  modified_base 8: mod_base = OTHER; note = 2'-O-methylguanosine-3'-phosphate
  modified_base 9: mod_base = OTHER; note = 2'-O-methyluridine-3'-phosphate
  modified_base 10: mod_base = OTHER; note = 2'-O-methyladenosine-3'-phosphate
  modified_base 11: mod_base = OTHER; note = 2'-O-methyluridine-3'-phosphate
  modified_base 12: mod_base = OTHER; note = 2'-O-methylcytidine-3'-phosphate
  modified_base 13: mod_base = OTHER; note = 2'-O-methylcytidine-3'-phosphate
  modified_base 14: mod_base = OTHER; note = 2'-deoxy-2'-fluoroadenosine-3'-phosphate
  modified_base 15: mod_base = OTHER; note = 2'-O-methyluridine-3'-phosphate
  modified_base 16: mod_base = OTHER; note = 2'-deoxy-2'-fluoroguanosine-3'-phosphate
  modified_base 17: mod_base = OTHER; note = 2'-O-methyladenosine-3'-phosphate
  modified_base 18: mod_base = OTHER; note = 2'-O-methylguanosine-3'-phosphate
  modified_base 19: mod_base = OTHER; note = 2'-O-methylcytidine-3'-phosphate
  modified_base 20: mod_base = OTHER; note = 2'-O-methylguanosine-3'-phosphate
  modified_base 21: mod_base = OTHER; note = 2'-O-methyluridine-3'-phosphate
  modified_base 22: mod_base = OTHER; note = 2'-O-methylguanosine-3'-phosphate
  modified_base 23: mod_base = OTHER; note = 2'-O-methyluridine
taggaatgtatccatgagcgtgt

SEQ ID NO: 4749 - RNA, 23 nt, synthetic construct
  source 1..23: mol_type = other RNA
  modified_base 1: mod_base = OTHER; note = 2'-O-methyluridine-3'-phosphate 5'phosphate
  modified_base 2: mod_base = OTHER; note = 2'-deoxy-2'-fluoroadenosine-3'-phosphate
  modified_base 3: mod_base = OTHER; note = 2'-O-methyladenosine-3'-phosphate
  modified_base 4: mod_base = OTHER; note = 2'-O-methylguanosine-3'-phosphate
  modified_base 5: mod_base = OTHER; note = 2'-O-methylguanosine-3'-phosphate
  modified_base 6: mod_base = OTHER; note = 2'-deoxy-2'-fluoroadenosine-3'-phosphate
  modified_base 7: mod_base = OTHER; note = 2'-O-methyladenosine-3'-phosphate
  modified_base 8: mod_base = OTHER; note = 2'-O-methyluridine-3'-phosphate
  modified_base 9: mod_base = OTHER; note = 2'-O-methylguanosine-3'-phosphate
  modified_base 10: mod_base = OTHER; note = 2'-O-methyluridine-3'-phosphate
  modified_base 11: mod_base = OTHER; note = 2'-O-methyladenosine-3'-phosphate
  modified_base 12: mod_base = OTHER; note = 2'-O-methyluridine-3'-phosphate
  modified_base 13: mod_base = OTHER; note = 2'-O-methylcytidine-3'-phosphate
  modified_base 14: mod_base = OTHER; note = 2'-deoxy-2'-fluorocytidine-3'-phosphate
  modified_base 15: mod_base = OTHER; note = 2'-O-methyladenosine-3'-phosphate
  modified_base 16: mod_base = OTHER; note = 2'-deoxy-2'-fluorouridine-3'-phosphate
  modified_base 17: mod_base = OTHER; note = 2'-O-methylguanosine-3'-phosphate
  modified_base 18: mod_base = OTHER; note = 2'-O-methyladenosine-3'-phosphate
  modified_base 19: mod_base = OTHER; note = 2'-O-methylguanosine-3'-phosphate
  modified_base 20: mod_base = OTHER; note = 2'-O-methylcytidine-3'-phosphate
  modified_base 21: mod_base = OTHER; note = 2'-O-methylguanosine-3'-phosphate
  modified_base 22: mod_base = OTHER; note = 2'-O-methyluridine-3'-phosphate
  modified_base 23: mod_base = OTHER; note = 2'-O-methylguanosine
taaggaatgtatccatgagcgtg

SEQ ID NO: 4750 - RNA, 23 nt, synthetic construct
  source 1..23: mol_type = other RNA
  modified_base 1: mod_base = OTHER; note = 2'-O-methyluridine-3'-phosphate 5'phosphate
  modified_base 2: mod_base = OTHER; note = 2'-deoxy-2'-fluoroguanosine-3'-phosphate
  modified_base 3: mod_base = OTHER; note = 2'-O-methyladenosine-3'-phosphate
  modified_base 4: mod_base = OTHER; note = 2'-O-methyladenosine-3'-phosphate
  modified_base 5: mod_base = OTHER; note = 2'-O-methylguanosine-3'-phosphate
  modified_base 6: mod_base = OTHER; note = 2'-deoxy-2'-fluoroguanosine-3'-phosphate
  modified_base 7: mod_base = OTHER; note = 2'-O-methyladenosine-3'-phosphate
  modified_base 8: mod_base = OTHER; note = 2'-O-methyladenosine-3'-phosphate
  modified_base 9: mod_base = OTHER; note = 2'-O-methyluridine-3'-phosphate
  modified_base 10: mod_base = OTHER; note = 2'-O-methylguanosine-3'-phosphate
  modified_base 11: mod_base = OTHER; note = 2'-O-methyluridine-3'-phosphate
  modified_base 12: mod_base = OTHER; note = 2'-O-methyladenosine-3'-phosphate
  modified_base 13: mod_base = OTHER; note = 2'-O-methyluridine-3'-phosphate
  modified_base 14: mod_base = OTHER; note = 2'-deoxy-2'-fluorocytidine-3'-phosphate
  modified_base 15: mod_base = OTHER; note = 2'-O-methylcytidine-3'-phosphate
  modified_base 16: mod_base = OTHER; note = 2'-deoxy-2'-fluoroadenosine-3'-phosphate
  modified_base 17: mod_base = OTHER; note = 2'-O-methyluridine-3'-phosphate
  modified_base 18: mod_base = OTHER; note = 2'-O-methylguanosine-3'-phosphate
  modified_base 19: mod_base = OTHER; note = 2'-O-methyladenosine-3'-phosphate
  modified_base 20: mod_base = OTHER; note = 2'-O-methylguanosine-3'-phosphate
  modified_base 21: mod_base = OTHER; note = 2'-O-methylcytidine-3'-phosphate
  modified_base 22: mod_base = OTHER; note = 2'-O-methylguanosine-3'-phosphate
  modified_base 23: mod_base = OTHER; note = 2'-O-methyluridine
tgaaggaatgtatccatgagcgt

SEQ ID NO: 4751 - RNA, 23 nt, synthetic construct
  source 1..23: mol_type = other RNA
  modified_base 1: mod_base = OTHER; note = 2'-O-methyluridine-3'-phosphate 5'phosphate
  modified_base 2: mod_base = OTHER; note = 2'-deoxy-2'-fluoroguanosine-3'-phosphate
  modified_base 3: mod_base = OTHER; note = 2'-O-methylguanosine-3'-phosphate
  modified_base 4: mod_base = OTHER; note = 2'-O-methyladenosine-3'-phosphate
  modified_base 5: mod_base = OTHER; note = 2'-O-methyladenosine-3'-phosphate
  modified_base 6: mod_base = OTHER; note = 2'-deoxy-2'-fluoroguanosine-3'-phosphate
  modified_base 7: mod_base = OTHER; note = 2'-O-methylguanosine-3'-phosphate
  modified_base 8: mod_base = OTHER; note = 2'-O-methyladenosine-3'-phosphate
  modified_base 9: mod_base = OTHER; note = 2'-O-methyladenosine-3'-phosphate
  modified_base 10: mod_base = OTHER; note = 2'-O-methyluridine-3'-phosphate
  modified_base 11: mod_base = OTHER; note = 2'-O-methylguanosine-3'-phosphate
  modified_base 12: mod_base = OTHER; note = 2'-O-methyluridine-3'-phosphate
  modified_base 13: mod_base = OTHER; note = 2'-O-methyladenosine-3'-phosphate
  modified_base 14: mod_base = OTHER; note = 2'-deoxy-2'-fluorouridine-3'-phosphate
  modified_base 15: mod_base = OTHER; note = 2'-O-methylcytidine-3'-phosphate
  modified_base 16: mod_base = OTHER; note = 2'-deoxy-2'-fluorocytidine-3'-phosphate
  modified_base 17: mod_base = OTHER; note = 2'-O-methyladenosine-3'-phosphate
  modified_base 18: mod_base = OTHER; note = 2'-O-methyluridine-3'-phosphate
  modified_base 19: mod_base = OTHER; note = 2'-O-methylguanosine-3'-phosphate
  modified_base 20: mod_base = OTHER; note = 2'-O-methyladenosine-3'-phosphate
  modified_base 21: mod_base = OTHER; note = 2'-O-methylguanosine-3'-phosphate
  modified_base 22: mod_base = OTHER; note = 2'-O-methylcytidine-3'-phosphate
  modified_base 23: mod_base = OTHER; note = 2'-O-methylguanosine
tggaaggaatgtatccatgagcg

SEQ ID NO: 4752 - RNA, 23 nt, synthetic construct
  source 1..23: mol_type = other RNA
  modified_base 1: mod_base = OTHER; note = 2'-O-methyluridine-3'-phosphate 5'phosphate
  modified_base 2: mod_base = OTHER; note = 2'-deoxy-2'-fluorouridine-3'-phosphate
  modified_base 3: mod_base = OTHER; note = 2'-O-methylguanosine-3'-phosphate
  modified_base 4: mod_base = OTHER; note = 2'-O-methylguanosine-3'-phosphate
  modified_base 5: mod_base = OTHER; note = 2'-O-methyladenosine-3'-phosphate
  modified_base 6: mod_base = OTHER; note = 2'-deoxy-2'-fluoroadenosine-3'-phosphate
  modified_base 7: mod_base = OTHER; note = 2'-O-methylguanosine-3'-phosphate
  modified_base 8: mod_base = OTHER; note = 2'-O-methylguanosine-3'-phosphate
  modified_base 9: mod_base = OTHER; note = 2'-O-methyladenosine-3'-phosphate
  modified_base 10: mod_base = OTHER; note = 2'-O-methyladenosine-3'-phosphate
  modified_base 11: mod_base = OTHER; note = 2'-O-methyluridine-3'-phosphate
  modified_base 12: mod_base = OTHER; note = 2'-O-methylguanosine-3'-phosphate
  modified_base 13: mod_base = OTHER; note = 2'-O-methyluridine-3'-phosphate
  modified_base 14: mod_base = OTHER; note = 2'-deoxy-2'-fluoroadenosine-3'-phosphate
  modified_base 15: mod_base = OTHER; note = 2'-O-methyluridine-3'-phosphate
  modified_base 16: mod_base = OTHER; note = 2'-deoxy-2'-fluorocytidine-3'-phosphate
  modified_base 17: mod_base = OTHER; note = 2'-O-methylcytidine-3'-phosphate
  modified_base 18: mod_base = OTHER; note = 2'-O-methyladenosine-3'-phosphate
  modified_base 19: mod_base = OTHER; note = 2'-O-methyluridine-3'-phosphate
  modified_base 20: mod_base = OTHER; note = 2'-O-methylguanosine-3'-phosphate
  modified_base 21: mod_base = OTHER; note = 2'-O-methyladenosine-3'-phosphate
  modified_base 22: mod_base = OTHER; note = 2'-O-methylguanosine-3'-phosphate
  modified_base 23: mod_base = OTHER; note = 2'-O-methylcytidine
ttggaaggaatgtatccatgagc

SEQ ID NO: 4753 - RNA, 23 nt, synthetic construct
  source 1..23: mol_type = other RNA
  modified_base 1: mod_base = OTHER; note = 2'-O-methyluridine-3'-phosphate 5'phosphate
  modified_base 2: mod_base = OTHER; note = 2'-deoxy-2'-fluorouridine-3'-phosphate
  modified_base 3: mod_base = OTHER; note = 2'-O-methyluridine-3'-phosphate
  modified_base 4: mod_base = OTHER; note = 2'-O-methylguanosine-3'-phosphate
  modified_base 5: mod_base = OTHER; note = 2'-O-methylguanosine-3'-phosphate
  modified_base 6: mod_base = OTHER; note = 2'-deoxy-2'-fluoroadenosine-3'-phosphate
  modified_base 7: mod_base = OTHER; note = 2'-O-methyladenosine-3'-phosphate
  modified_base 8: mod_base = OTHER; note = 2'-O-methylguanosine-3'-phosphate
  modified_base 9: mod_base = OTHER; note = 2'-O-methylguanosine-3'-phosphate
  modified_base 10: mod_base = OTHER; note = 2'-O-methyladenosine-3'-phosphate
  modified_base 11: mod_base = OTHER; note = 2'-O-methyladenosine-3'-phosphate
  modified_base 12: mod_base = OTHER; note = 2'-O-methyluridine-3'-phosphate
  modified_base 13: mod_base = OTHER; note = 2'-O-methylguanosine-3'-phosphate
  modified_base 14: mod_base = OTHER; note = 2'-deoxy-2'-fluorouridine-3'-phosphate
  modified_base 15: mod_base = OTHER; note = 2'-O-methyladenosine-3'-phosphate
  modified_base 16: mod_base = OTHER; note = 2'-deoxy-2'-fluorouridine-3'-phosphate
  modified_base 17: mod_base = OTHER; note = 2'-O-methylcytidine-3'-phosphate
  modified_base 18: mod_base = OTHER; note = 2'-O-methylcytidine-3'-phosphate
  modified_base 19: mod_base = OTHER; note = 2'-O-methyladenosine-3'-phosphate
  modified_base 20: mod_base = OTHER; note = 2'-O-methyluridine-3'-phosphate
  modified_base 21: mod_base = OTHER; note = 2'-O-methylguanosine-3'-phosphate
  modified_base 22: mod_base = OTHER; note = 2'-O-methyladenosine-3'-phosphate
  modified_base 23: mod_base = OTHER; note = 2'-O-methylguanosine
tttggaaggaatgtatccatgag

SEQ ID NO: 4754 - RNA, 23 nt, synthetic construct
  source 1..23: mol_type = other RNA
  modified_base 1: mod_base = OTHER; note = 2'-O-methyluridine-3'-phosphate 5'phosphate
  modified_base 2: mod_base = OTHER; note = 2'-deoxy-2'-fluorouridine-3'-phosphate
  modified_base 3: mod_base = OTHER; note = 2'-O-methyluridine-3'-phosphate
  modified_base 4: mod_base = OTHER; note = 2'-O-methyluridine-3'-phosphate
  modified_base 5: mod_base = OTHER; note = 2'-O-methylguanosine-3'-phosphate
  modified_base 6: mod_base = OTHER; note = 2'-deoxy-2'-fluoroguanosine-3'-phosphate
  modified_base 7: mod_base = OTHER; note = 2'-O-methyladenosine-3'-phosphate
  modified_base 8: mod_base = OTHER; note = 2'-O-methyladenosine-3'-phosphate
  modified_base 9: mod_base = OTHER; note = 2'-O-methylguanosine-3'-phosphate
  modified_base 10: mod_base = OTHER; note = 2'-O-methylguanosine-3'-phosphate
  modified_base 11: mod_base = OTHER; note = 2'-O-methyladenosine-3'-phosphate
  modified_base 12: mod_base = OTHER; note = 2'-O-methyladenosine-3'-phosphate
  modified_base 13: mod_base = OTHER; note = 2'-O-methyluridine-3'-phosphate
  modified_base 14: mod_base = OTHER; note = 2'-deoxy-2'-fluoroguanosine-3'-phosphate
  modified_base 15: mod_base = OTHER; note = 2'-O-methyluridine-3'-phosphate
  modified_base 16: mod_base = OTHER; note = 2'-deoxy-2'-fluoroadenosine-3'-phosphate
  modified_base 17: mod_base = OTHER; note = 2'-O-methyluridine-3'-phosphate
  modified_base 18: mod_base = OTHER; note = 2'-O-methylcytidine-3'-phosphate
  modified_base 19: mod_base = OTHER; note = 2'-O-methylcytidine-3'-phosphate
  modified_base 20: mod_base = OTHER; note = 2'-O-methyladenosine-3'-phosphate
  modified_base 21: mod_base = OTHER; note = 2'-O-methyluridine-3'-phosphate
  modified_base 22: mod_base = OTHER; note = 2'-O-methylguanosine-3'-phosphate
  modified_base 23: mod_base = OTHER; note = 2'-O-methyladenosine
ttttggaaggaatgtatccatga

SEQ ID NO: 4755 - RNA, 23 nt, synthetic construct
  source 1..23: mol_type = other RNA
  modified_base 1: mod_base = OTHER; note = 2'-O-methyluridine-3'-phosphate 5'phosphate
  modified_base 2: mod_base = OTHER; note = 2'-deoxy-2'-fluoroadenosine-3'-phosphate
  modified_base 3: mod_base = OTHER; note = 2'-O-methyluridine-3'-phosphate
  modified_base 4: mod_base = OTHER; note = 2'-O-methyluridine-3'-phosphate
  modified_base 5: mod_base = OTHER; note = 2'-O-methyluridine-3'-phosphate
  modified_base 6: mod_base = OTHER; note = 2'-deoxy-2'-fluoroguanosine-3'-phosphate
  modified_base 7: mod_base = OTHER; note = 2'-O-methylguanosine-3'-phosphate
  modified_base 8: mod_base = OTHER; note = 2'-O-methyladenosine-3'-phosphate
  modified_base 9: mod_base = OTHER; note = 2'-O-methyladenosine-3'-phosphate
  modified_base 10: mod_base = OTHER; note = 2'-O-methylguanosine-3'-phosphate
  modified_base 11: mod_base = OTHER; note = 2'-O-methylguanosine-3'-phosphate
  modified_base 12: mod_base = OTHER; note = 2'-O-methyladenosine-3'-phosphate
  modified_base 13: mod_base = OTHER; note = 2'-O-methyladenosine-3'-phosphate
  modified_base 14: mod_base = OTHER; note = 2'-deoxy-2'-fluorouridine-3'-phosphate
  modified_base 15: mod_base = OTHER; note = 2'-O-methylguanosine-3'-phosphate
  modified_base 16: mod_base = OTHER; note = 2'-deoxy-2'-fluorouridine-3'-phosphate
  modified_base 17: mod_base = OTHER; note = 2'-O-methyladenosine-3'-phosphate
  modified_base 18: mod_base = OTHER; note = 2'-O-methyluridine-3'-phosphate
  modified_base 19: mod_base = OTHER; note = 2'-O-methylcytidine-3'-phosphate
  modified_base 20: mod_base = OTHER; note = 2'-O-methylcytidine-3'-phosphate
  modified_base 21: mod_base = OTHER; note = 2'-O-methyladenosine-3'-phosphate
  modified_base 22: mod_base = OTHER; note = 2'-O-methyluridine-3'-phosphate
  modified_base 23: mod_base = OTHER; note = 2'-O-methylguanosine
tatttggaaggaatgtatccatg

SEQ ID NO: 4756 - RNA, 23 nt, synthetic construct
  source 1..23: mol_type = other RNA
  modified_base 1: mod_base = OTHER; note = 2'-O-methyluridine-3'-phosphate 5'phosphate
  modified_base 2: mod_base = OTHER; note = 2'-deoxy-2'-fluoroadenosine-3'-phosphate
  modified_base 3: mod_base = OTHER; note = 2'-O-methyladenosine-3'-phosphate
  modified_base 4: mod_base = OTHER; note = 2'-O-methyluridine-3'-phosphate
  modified_base 5: mod_base = OTHER; note = 2'-O-methyluridine-3'-phosphate
  modified_base 6: mod_base = OTHER; note = 2'-deoxy-2'-fluorouridine-3'-phosphate
  modified_base 7: mod_base = OTHER; note = 2'-O-methylguanosine-3'-phosphate
  modified_base 8: mod_base = OTHER; note = 2'-O-methylguanosine-3'-phosphate
  modified_base 9: mod_base = OTHER; note = 2'-O-methyladenosine-3'-phosphate
  modified_base 10: mod_base = OTHER; note = 2'-O-methyladenosine-3'-phosphate
  modified_base 11: mod_base = OTHER; note = 2'-O-methylguanosine-3'-phosphate
  modified_base 12: mod_base = OTHER; note = 2'-O-methylguanosine-3'-phosphate
  modified_base 13: mod_base = OTHER; note = 2'-O-methyladenosine-3'-phosphate
  modified_base 14: mod_base = OTHER; note = 2'-deoxy-2'-fluoroadenosine-3'-phosphate
  modified_base 15: mod_base = OTHER; note = 2'-O-methyluridine-3'-phosphate
  modified_base 16: mod_base = OTHER; note = 2'-deoxy-2'-fluoroguanosine-3'-phosphate
  modified_base 17: mod_base = OTHER; note = 2'-O-methyluridine-3'-phosphate
  modified_base 18: mod_base = OTHER; note = 2'-O-methyladenosine-3'-phosphate
  modified_base 19: mod_base = OTHER; note = 2'-O-methyluridine-3'-phosphate
  modified_base 20: mod_base = OTHER; note = 2'-O-methylcytidine-3'-phosphate
  modified_base 21: mod_base = OTHER; note = 2'-O-methylcytidine-3'-phosphate
  modified_base 22: mod_base = OTHER; note = 2'-O-methyladenosine-3'-phosphate
  modified_base 23: mod_base = OTHER; note = 2'-O-methyluridine
taatttggaaggaatgtatccat

SEQ ID NO: 4757 - RNA, 23 nt, synthetic construct
  source 1..23: mol_type = other RNA
  modified_base 1: mod_base = OTHER; note = 2'-O-methyluridine-3'-phosphate 5'phosphate
  modified_base 2: mod_base = OTHER; note = 2'-deoxy-2'-fluoroadenosine-3'-phosphate
  modified_base 3: mod_base = OTHER; note = 2'-O-methyladenosine-3'-phosphate
  modified_base 4: mod_base = OTHER; note = 2'-O-methyladenosine-3'-phosphate
  modified_base 5: mod_base = OTHER; note = 2'-O-methyluridine-3'-phosphate
  modified_base 6: mod_base = OTHER; note = 2'-deoxy-2'-fluorouridine-3'-phosphate
  modified_base 7: mod_base = OTHER; note = 2'-O-methyluridine-3'-phosphate
  modified_base 8: mod_base = OTHER; note = 2'-O-methylguanosine-3'-phosphate
  modified_base 9: mod_base = OTHER; note = 2'-O-methylguanosine-3'-phosphate
  modified_base 10: mod_base = OTHER; note = 2'-O-methyladenosine-3'-phosphate
  modified_base 11: mod_base = OTHER; note = 2'-O-methyladenosine-3'-phosphate
  modified_base 12: mod_base = OTHER; note = 2'-O-methylguanosine-3'-phosphate
  modified_base 13: mod_base = OTHER; note = 2'-O-methylguanosine-3'-phosphate
  modified_base 14: mod_base = OTHER; note = 2'-deoxy-2'-fluoroadenosine-3'-phosphate
  modified_base 15: mod_base = OTHER; note = 2'-O-methyladenosine-3'-phosphate
  modified_base 16: mod_base = OTHER; note = 2'-deoxy-2'-fluorouridine-3'-phosphate
  modified_base 17: mod_base = OTHER; note = 2'-O-methylguanosine-3'-phosphate
  modified_base 18: mod_base = OTHER; note = 2'-O-methyluridine-3'-phosphate
  modified_base 19: mod_base = OTHER; note = 2'-O-methyladenosine-3'-phosphate
  modified_base 20: mod_base = OTHER; note = 2'-O-methyluridine-3'-phosphate
  modified_base 21: mod_base = OTHER; note = 2'-O-methylcytidine-3'-phosphate
  modified_base 22: mod_base = OTHER; note = 2'-O-methylcytidine-3'-phosphate
  modified_base 23: mod_base = OTHER; note = 2'-O-methyladenosine
taaatttggaaggaatgtatcca

SEQ ID NO: 4758 - RNA, 23 nt, synthetic construct
  source 1..23: mol_type = other RNA
  modified_base 1: mod_base = OTHER; note = 2'-O-methyluridine-3'-phosphate 5'phosphate
  modified_base 2: mod_base = OTHER; note = 2'-deoxy-2'-fluoroguanosine-3'-phosphate
  modified_base 3: mod_base = OTHER; note = 2'-O-methyladenosine-3'-phosphate
  modified_base 4: mod_base = OTHER; note = 2'-O-methyladenosine-3'-phosphate
  modified_base 5: mod_base = OTHER; note = 2'-O-methyladenosine-3'-phosphate
  modified_base 6: mod_base = OTHER; note = 2'-deoxy-2'-fluorouridine-3'-phosphate
  modified_base 7: mod_base = OTHER; note = 2'-O-methyluridine-3'-phosphate
  modified_base 8: mod_base = OTHER; note = 2'-O-methyluridine-3'-phosphate
  modified_base 9: mod_base = OTHER; note = 2'-O-methylguanosine-3'-phosphate
  modified_base 10: mod_base = OTHER; note = 2'-O-methylguanosine-3'-phosphate
  modified_base 11: mod_base = OTHER; note = 2'-O-methyladenosine-3'-phosphate
  modified_base 12: mod_base = OTHER; note = 2'-O-methyladenosine-3'-phosphate
  modified_base 13: mod_base = OTHER; note = 2'-O-methylguanosine-3'-phosphate
  modified_base 14: mod_base = OTHER; note = 2'-deoxy-2'-fluoroguanosine-3'-phosphate
  modified_base 15: mod_base = OTHER; note = 2'-O-methyladenosine-3'-phosphate
  modified_base 16: mod_base = OTHER; note = 2'-deoxy-2'-fluoroadenosine-3'-phosphate
  modified_base 17: mod_base = OTHER; note = 2'-O-methyluridine-3'-phosphate
  modified_base 18: mod_base = OTHER; note = 2'-O-methylguanosine-3'-phosphate
  modified_base 19: mod_base = OTHER; note = 2'-O-methyluridine-3'-phosphate
  modified_base 20: mod_base = OTHER; note = 2'-O-methyladenosine-3'-phosphate
  modified_base 21: mod_base = OTHER; note = 2'-O-methyluridine-3'-phosphate
  modified_base 22: mod_base = OTHER; note = 2'-O-methylcytidine-3'-phosphate
  modified_base 23: mod_base = OTHER; note = 2'-O-methylcytidine
tgaaatttggaaggaatgtatcc

SEQ ID NO: 4759 - RNA, 23 nt, synthetic construct
  source 1..23: mol_type = other RNA
  modified_base 1: mod_base = OTHER; note = 2'-O-methyluridine-3'-phosphate 5'phosphate
  modified_base 2: mod_base = OTHER; note = 2'-deoxy-2'-fluoroguanosine-3'-phosphate
  modified_base 3: mod_base = OTHER; note = 2'-O-methylguanosine-3'-phosphate
  modified_base 4: mod_base = OTHER; note = 2'-O-methyladenosine-3'-phosphate
  modified_base 5: mod_base = OTHER; note = 2'-O-methyladenosine-3'-phosphate
  modified_base 6: mod_base = OTHER; note = 2'-deoxy-2'-fluoroadenosine-3'-phosphate
  modified_base 7: mod_base = OTHER; note = 2'-O-methyluridine-3'-phosphate
  modified_base 8: mod_base = OTHER; note = 2'-O-methyluridine-3'-phosphate
  modified_base 9: mod_base = OTHER; note = 2'-O-methyluridine-3'-phosphate
  modified_base 10: mod_base = OTHER; note = 2'-O-methylguanosine-3'-phosphate
  modified_base 11: mod_base = OTHER; note = 2'-O-methylguanosine-3'-phosphate
  modified_base 12: mod_base = OTHER; note = 2'-O-methyladenosine-3'-phosphate
  modified_base 13: mod_base = OTHER; note = 2'-O-methyladenosine-3'-phosphate
  modified_base 14: mod_base = OTHER; note = 2'-deoxy-2'-fluoroguanosine-3'-phosphate
  modified_base 15: mod_base = OTHER; note = 2'-O-methylguanosine-3'-phosphate
  modified_base 16: mod_base = OTHER; note = 2'-deoxy-2'-fluoroadenosine-3'-phosphate
  modified_base 17: mod_base = OTHER; note = 2'-O-methyladenosine-3'-phosphate
  modified_base 18: mod_base = OTHER; note = 2'-O-methyluridine-3'-phosphate
  modified_base 19: mod_base = OTHER; note = 2'-O-methylguanosine-3'-phosphate
  modified_base 20: mod_base = OTHER; note = 2'-O-methyluridine-3'-phosphate
  modified_base 21: mod_base = OTHER; note = 2'-O-methyladenosine-3'-phosphate
  modified_base 22: mod_base = OTHER; note = 2'-O-methyluridine-3'-phosphate
  modified_base 23: mod_base = OTHER; note = 2'-O-methylcytidine
tggaaatttggaaggaatgtatc

SEQ ID NO: 4760 - RNA, 23 nt, synthetic construct
  source 1..23: mol_type = other RNA
  modified_base 1: mod_base = OTHER; note = 2'-O-methyluridine-3'-phosphate 5'phosphate
  modified_base 2: mod_base = OTHER; note = 2'-deoxy-2'-fluorouridine-3'-phosphate
  modified_base 3: mod_base = OTHER; note = 2'-O-methylguanosine-3'-phosphate
  modified_base 4: mod_base = OTHER; note = 2'-O-methylguanosine-3'-phosphate
  modified_base 5: mod_base = OTHER; note = 2'-O-methyladenosine-3'-phosphate
  modified_base 6: mod_base = OTHER; note = 2'-deoxy-2'-fluoroadenosine-3'-phosphate
  modified_base 7: mod_base = OTHER; note = 2'-O-methyladenosine-3'-phosphate
  modified_base 8: mod_base = OTHER; note = 2'-O-methyluridine-3'-phosphate
  modified_base 9: mod_base = OTHER; note = 2'-O-methyluridine-3'-phosphate
  modified_base 10: mod_base = OTHER; note = 2'-O-methyluridine-3'-phosphate
  modified_base 11: mod_base = OTHER; note = 2'-O-methylguanosine-3'-phosphate
  modified_base 12: mod_base = OTHER; note = 2'-O-methylguanosine-3'-phosphate
  modified_base 13: mod_base = OTHER; note = 2'-O-methyladenosine-3'-phosphate
  modified_base 14: mod_base = OTHER; note = 2'-deoxy-2'-fluoroadenosine-3'-phosphate
  modified_base 15: mod_base = OTHER; note = 2'-O-methylguanosine-3'-phosphate
  modified_base 16: mod_base = OTHER; note = 2'-deoxy-2'-fluoroguanosine-3'-phosphate
  modified_base 17: mod_base = OTHER; note = 2'-O-methyladenosine-3'-phosphate
  modified_base 18: mod_base = OTHER; note = 2'-O-methyladenosine-3'-phosphate
  modified_base 19: mod_base = OTHER; note = 2'-O-methyluridine-3'-phosphate
  modified_base 20: mod_base = OTHER; note = 2'-O-methylguanosine-3'-phosphate
  modified_base 21: mod_base = OTHER; note = 2'-O-methyluridine-3'-phosphate
  modified_base 22: mod_base = OTHER; note = 2'-O-methyladenosine-3'-phosphate
  modified_base 23: mod_base = OTHER; note = 2'-O-methyluridine
ttggaaatttggaaggaatgtat

SEQ ID NO: 4761 - RNA, 23 nt, synthetic construct
  source 1..23: mol_type = other RNA
  modified_base 1: mod_base = OTHER; note = 2'-O-methyluridine-3'-phosphate 5'phosphate
  modified_base 2: mod_base = OTHER; note = 2'-deoxy-2'-fluorouridine-3'-phosphate
  modified_base 3: mod_base = OTHER; note = 2'-O-methyluridine-3'-phosphate
  modified_base 4: mod_base = OTHER; note = 2'-O-methylguanosine-3'-phosphate
  modified_base 5: mod_base = OTHER; note = 2'-O-methylguanosine-3'-phosphate
  modified_base 6: mod_base = OTHER; note = 2'-deoxy-2'-fluoroadenosine-3'-phosphate
  modified_base 7: mod_base = OTHER; note = 2'-O-methyladenosine-3'-phosphate
  modified_base 8: mod_base = OTHER; note = 2'-O-methyladenosine-3'-phosphate
  modified_base 9: mod_base = OTHER; note = 2'-O-methyluridine-3'-phosphate
  modified_base 10: mod_base = OTHER; note = 2'-O-methyluridine-3'-phosphate
  modified_base 11: mod_base = OTHER; note = 2'-O-methyluridine-3'-phosphate
  modified_base 12: mod_base = OTHER; note = 2'-O-methylguanosine-3'-phosphate
  modified_base 13: mod_base = OTHER; note = 2'-O-methylguanosine-3'-phosphate
  modified_base 14: mod_base = OTHER; note = 2'-deoxy-2'-fluoroadenosine-3'-phosphate
  modified_base 15: mod_base = OTHER; note = 2'-O-methyladenosine-3'-phosphate
  modified_base 16: mod_base = OTHER; note = 2'-deoxy-2'-fluoroguanosine-3'-phosphate
  modified_base 17: mod_base = OTHER; note = 2'-O-methylguanosine-3'-phosphate
  modified_base 18: mod_base = OTHER; note = 2'-O-methyladenosine-3'-phosphate
  modified_base 19: mod_base = OTHER; note = 2'-O-methyladenosine-3'-phosphate
  modified_base 20: mod_base = OTHER; note = 2'-O-methyluridine-3'-phosphate
  modified_base 21: mod_base = OTHER; note = 2'-O-methylguanosine-3'-phosphate
  modified_base 22: mod_base = OTHER; note = 2'-O-methyluridine-3'-phosphate
  modified_base 23: mod_base = OTHER; note = 2'-O-methyladenosine
tttggaaatttggaaggaatgta

SEQ ID NO: 4762 - RNA, 23 nt, synthetic construct
  source 1..23: mol_type = other RNA
  modified_base 1: mod_base = OTHER; note = 2'-O-methyluridine-3'-phosphate 5'phosphate
  modified_base 2: mod_base = OTHER; note = 2'-deoxy-2'-fluorouridine-3'-phosphate
  modified_base 3: mod_base = OTHER; note = 2'-O-methyluridine-3'-phosphate
  modified_base 4: mod_base = OTHER; note = 2'-O-methyluridine-3'-phosphate
  modified_base 5: mod_base = OTHER; note = 2'-O-methylguanosine-3'-phosphate
  modified_base 6: mod_base = OTHER; note = 2'-deoxy-2'-fluoroguanosine-3'-phosphate
  modified_base 7: mod_base = OTHER; note = 2'-O-methyladenosine-3'-phosphate
  modified_base 8: mod_base = OTHER; note = 2'-O-methyladenosine-3'-phosphate
  modified_base 9: mod_base = OTHER; note = 2'-O-methyladenosine-3'-phosphate
  modified_base 10: mod_base = OTHER; note = 2'-O-methyluridine-3'-phosphate
  modified_base 11: mod_base = OTHER; note = 2'-O-methyluridine-3'-phosphate
  modified_base 12: mod_base = OTHER; note = 2'-O-methyluridine-3'-phosphate
  modified_base 13: mod_base = OTHER; note = 2'-O-methylguanosine-3'-phosphate
  modified_base 14: mod_base = OTHER; note = 2'-deoxy-2'-fluoroguanosine-3'-phosphate
  modified_base 15: mod_base = OTHER; note = 2'-O-methyladenosine-3'-phosphate
  modified_base 16: mod_base = OTHER; note = 2'-deoxy-2'-fluoroadenosine-3'-phosphate
  modified_base 17: mod_base = OTHER; note = 2'-O-methylguanosine-3'-phosphate
  modified_base 18: mod_base = OTHER; note = 2'-O-methylguanosine-3'-phosphate
  modified_base 19: mod_base = OTHER; note = 2'-O-methyladenosine-3'-phosphate
  modified_base 20: mod_base = OTHER; note = 2'-O-methyladenosine-3'-phosphate
  modified_base 21: mod_base = OTHER; note = 2'-O-methyluridine-3'-phosphate
  modified_base 22: mod_base = OTHER; note = 2'-O-methylguanosine-3'-phosphate
  modified_base 23: mod_base = OTHER; note = 2'-O-methyluridine
ttttggaaatttggaaggaatgt

SEQ ID NO: 4763 - RNA, 23 nt, synthetic construct
  source 1..23: mol_type = other RNA
  modified_base 1: mod_base = OTHER; note = 2'-O-methyluridine-3'-phosphate 5'phosphate
  modified_base 2: mod_base = OTHER; note = 2'-deoxy-2'-fluoroguanosine-3'-phosphate
  modified_base 3: mod_base = OTHER; note = 2'-O-methyluridine-3'-phosphate
  modified_base 4: mod_base = OTHER; note = 2'-O-methyluridine-3'-phosphate
  modified_base 5: mod_base = OTHER; note = 2'-O-methyluridine-3'-phosphate
  modified_base 6: mod_base = OTHER; note = 2'-deoxy-2'-fluoroguanosine-3'-phosphate
  modified_base 7: mod_base = OTHER; note = 2'-O-methylguanosine-3'-phosphate
  modified_base 8: mod_base = OTHER; note = 2'-O-methyladenosine-3'-phosphate
  modified_base 9: mod_base = OTHER; note = 2'-O-methyladenosine-3'-phosphate
  modified_base 10: mod_base = OTHER; note = 2'-O-methyladenosine-3'-phosphate
  modified_base 11: mod_base = OTHER; note = 2'-O-methyluridine-3'-phosphate
  modified_base 12: mod_base = OTHER; note = 2'-O-methyluridine-3'-phosphate
  modified_base 13: mod_base = OTHER; note = 2'-O-methyluridine-3'-phosphate
  modified_base 14: mod_base = OTHER; note = 2'-deoxy-2'-fluoroguanosine-3'-phosphate
  modified_base 15: mod_base = OTHER; note = 2'-O-methylguanosine-3'-phosphate
  modified_base 16: mod_base = OTHER; note = 2'-deoxy-2'-fluoroadenosine-3'-phosphate
  modified_base 17: mod_base = OTHER; note = 2'-O-methyladenosine-3'-phosphate
  modified_base 18: mod_base = OTHER; note = 2'-O-methylguanosine-3'-phosphate
  modified_base 19: mod_base = OTHER; note = 2'-O-methylguanosine-3'-phosphate
  modified_base 20: mod_base = OTHER; note = 2'-O-methyladenosine-3'-phosphate
  modified_base 21: mod_base = OTHER; note = 2'-O-methyladenosine-3'-phosphate
  modified_base 22: mod_base = OTHER; note = 2'-O-methyluridine-3'-phosphate
  modified_base 23: mod_base = OTHER; note = 2'-O-methylguanosine
tgtttggaaatttggaaggaatg

SEQ ID NO: 4764 - RNA, 23 nt, synthetic construct
  source 1..23: mol_type = other RNA
  modified_base 1: mod_base = OTHER; note = 2'-O-methyluridine-3'-phosphate 5'phosphate
  modified_base 2: mod_base = OTHER; note = 2'-deoxy-2'-fluorouridine-3'-phosphate
  modified_base 3: mod_base = OTHER; note = 2'-O-methylguanosine-3'-phosphate
  modified_base 4: mod_base = OTHER; note = 2'-O-methyluridine-3'-phosphate
  modified_base 5: mod_base = OTHER; note = 2'-O-methyluridine-3'-phosphate
  modified_base 6: mod_base = OTHER; note = 2'-deoxy-2'-fluorouridine-3'-phosphate
  modified_base 7: mod_base = OTHER; note = 2'-O-methylguanosine-3'-phosphate
  modified_base 8: mod_base = OTHER; note = 2'-O-methylguanosine-3'-phosphate
  modified_base 9: mod_base = OTHER; note = 2'-O-methyladenosine-3'-phosphate
  modified_base 10: mod_base = OTHER; note = 2'-O-methyladenosine-3'-phosphate
  modified_base 11: mod_base = OTHER; note = 2'-O-methyladenosine-3'-phosphate
  modified_base 12: mod_base = OTHER; note = 2'-O-methyluridine-3'-phosphate
  modified_base 13: mod_base = OTHER; note = 2'-O-methyluridine-3'-phosphate
  modified_base 14: mod_base = OTHER; note = 2'-deoxy-2'-fluorouridine-3'-phosphate
  modified_base 15: mod_base = OTHER; note = 2'-O-methylguanosine-3'-phosphate
  modified_base 16: mod_base = OTHER; note = 2'-deoxy-2'-fluoroguanosine-3'-phosphate
  modified_base 17: mod_base = OTHER; note = 2'-O-methyladenosine-3'-phosphate
  modified_base 18: mod_base = OTHER; note = 2'-O-methyladenosine-3'-phosphate
  modified_base 19: mod_base = OTHER; note = 2'-O-methylguanosine-3'-phosphate
  modified_base 20: mod_base = OTHER; note = 2'-O-methylguanosine-3'-phosphate
  modified_base 21: mod_base = OTHER; note = 2'-O-methyladenosine-3'-phosphate
  modified_base 22: mod_base = OTHER; note = 2'-O-methyladenosine-3'-phosphate
  modified_base 23: mod_base = OTHER; note = 2'-O-methyluridine
ttgtttggaaatttggaaggaat

SEQ ID NO: 4765 - RNA, 23 nt, synthetic construct
  source 1..23: mol_type = other RNA
  modified_base 1: mod_base = OTHER; note = 2'-O-methyluridine-3'-phosphate 5'phosphate
  modified_base 2: mod_base = OTHER; note = 2'-deoxy-2'-fluorouridine-3'-phosphate
  modified_base 3: mod_base = OTHER; note = 2'-O-methyluridine-3'-phosphate
  modified_base 4: mod_base = OTHER; note = 2'-O-methylguanosine-3'-phosphate
  modified_base 5: mod_base = OTHER; note = 2'-O-methyluridine-3'-phosphate
  modified_base 6: mod_base = OTHER; note = 2'-deoxy-2'-fluorouridine-3'-phosphate
  modified_base 7: mod_base = OTHER; note = 2'-O-methyluridine-3'-phosphate
  modified_base 8: mod_base = OTHER; note = 2'-O-methylguanosine-3'-phosphate
  modified_base 9: mod_base = OTHER; note = 2'-O-methylguanosine-3'-phosphate
  modified_base 10: mod_base = OTHER; note = 2'-O-methyladenosine-3'-phosphate
  modified_base 11: mod_base = OTHER; note = 2'-O-methyladenosine-3'-phosphate
  modified_base 12: mod_base = OTHER; note = 2'-O-methyladenosine-3'-phosphate
  modified_base 13: mod_base = OTHER; note = 2'-O-methyluridine-3'-phosphate
  modified_base 14: mod_base = OTHER; note = 2'-deoxy-2'-fluorouridine-3'-phosphate
  modified_base 15: mod_base = OTHER; note = 2'-O-methyluridine-3'-phosphate
  modified_base 16: mod_base = OTHER; note = 2'-deoxy-2'-fluoroguanosine-3'-phosphate
  modified_base 17: mod_base = OTHER; note = 2'-O-methylguanosine-3'-phosphate
  modified_base 18: mod_base = OTHER; note = 2'-O-methyladenosine-3'-phosphate
  modified_base 19: mod_base = OTHER; note = 2'-O-methyladenosine-3'-phosphate
  modified_base 20: mod_base = OTHER; note = 2'-O-methylguanosine-3'-phosphate
  modified_base 21: mod_base = OTHER; note = 2'-O-methylguanosine-3'-phosphate
  modified_base 22: mod_base = OTHER; note = 2'-O-methyladenosine-3'-phosphate
  modified_base 23: mod_base = OTHER; note = 2'-O-methyladenosine
tttgtttggaaatttggaaggaa

SEQ ID NO: 4766 - RNA, 23 nt, synthetic construct
  source 1..23: mol_type = other RNA
  modified_base 1: mod_base = OTHER; note = 2'-O-methyluridine-3'-phosphate 5'phosphate
  modified_base 2: mod_base = OTHER; note = 2'-deoxy-2'-fluorocytidine-3'-phosphate
  modified_base 3: mod_base = OTHER; note = 2'-O-methyluridine-3'-phosphate
  modified_base 4: mod_base = OTHER; note = 2'-O-methyluridine-3'-phosphate
  modified_base 5: mod_base = OTHER; note = 2'-O-methylguanosine-3'-phosphate
  modified_base 6: mod_base = OTHER; note = 2'-deoxy-2'-fluorouridine-3'-phosphate
  modified_base 7: mod_base = OTHER; note = 2'-O-methyluridine-3'-phosphate
  modified_base 8: mod_base = OTHER; note = 2'-O-methyluridine-3'-phosphate
  modified_base 9: mod_base = OTHER; note = 2'-O-methylguanosine-3'-phosphate
  modified_base 10: mod_base = OTHER; note = 2'-O-methylguanosine-3'-phosphate
  modified_base 11: mod_base = OTHER; note = 2'-O-methyladenosine-3'-phosphate
  modified_base 12: mod_base = OTHER; note = 2'-O-methyladenosine-3'-phosphate
  modified_base 13: mod_base = OTHER; note = 2'-O-methyladenosine-3'-phosphate
  modified_base 14: mod_base = OTHER; note = 2'-deoxy-2'-fluorouridine-3'-phosphate
  modified_base 15: mod_base = OTHER; note = 2'-O-methyluridine-3'-phosphate
  modified_base 16: mod_base = OTHER; note = 2'-deoxy-2'-fluorouridine-3'-phosphate
  modified_base 17: mod_base = OTHER; note = 2'-O-methylguanosine-3'-phosphate
  modified_base 18: mod_base = OTHER; note = 2'-O-methylguanosine-3'-phosphate
  modified_base 19: mod_base = OTHER; note = 2'-O-methyladenosine-3'-phosphate
  modified_base 20: mod_base = OTHER; note = 2'-O-methyladenosine-3'-phosphate
  modified_base 21: mod_base = OTHER; note = 2'-O-methylguanosine-3'-phosphate
  modified_base 22: mod_base = OTHER; note = 2'-O-methylguanosine-3'-phosphate
  modified_base 23: mod_base = OTHER; note = 2'-O-methyladenosine
tcttgtttggaaatttggaagga

SEQ ID NO: 4767 - RNA, 23 nt, synthetic construct
  source 1..23: mol_type = other RNA
  modified_base 1: mod_base = OTHER; note = 2'-O-methyluridine-3'-phosphate 5'phosphate
  modified_base 2: mod_base = OTHER; note = 2'-deoxy-2'-fluorouridine-3'-phosphate
  modified_base 3: mod_base = OTHER; note = 2'-O-methylcytidine-3'-phosphate
  modified_base 4: mod_base = OTHER; note = 2'-O-methyluridine-3'-phosphate
  modified_base 5: mod_base = OTHER; note = 2'-O-methyluridine-3'-phosphate
  modified_base 6: mod_base = OTHER; note = 2'-deoxy-2'-fluoroguanosine-3'-phosphate
  modified_base 7: mod_base = OTHER; note = 2'-O-methyluridine-3'-phosphate
  modified_base 8: mod_base = OTHER; note = 2'-O-methyluridine-3'-phosphate
  modified_base 9: mod_base = OTHER; note = 2'-O-methyluridine-3'-phosphate
  modified_base 10: mod_base = OTHER; note = 2'-O-methylguanosine-3'-phosphate
  modified_base 11: mod_base = OTHER; note = 2'-O-methylguanosine-3'-phosphate
  modified_base 12: mod_base = OTHER; note = 2'-O-methyladenosine-3'-phosphate
  modified_base 13: mod_base = OTHER; note = 2'-O-methyladenosine-3'-phosphate
  modified_base 14: mod_base = OTHER; note = 2'-deoxy-2'-fluoroadenosine-3'-phosphate
  modified_base 15: mod_base = OTHER; note = 2'-O-methyluridine-3'-phosphate
  modified_base 16: mod_base = OTHER; note = 2'-deoxy-2'-fluorouridine-3'-phosphate
  modified_base 17: mod_base = OTHER; note = 2'-O-methyluridine-3'-phosphate
  modified_base 18: mod_base = OTHER; note = 2'-O-methylguanosine-3'-phosphate
  modified_base 19: mod_base = OTHER; note = 2'-O-methylguanosine-3'-phosphate
  modified_base 20: mod_base = OTHER; note = 2'-O-methyladenosine-3'-phosphate
  modified_base 21: mod_base = OTHER; note = 2'-O-methyladenosine-3'-phosphate
  modified_base 22: mod_base = OTHER; note = 2'-O-methylguanosine-3'-phosphate
  modified_base 23: mod_base = OTHER; note = 2'-O-methylguanosine
ttcttgtttggaaatttggaagg

SEQ ID NO: 4768 - RNA, 23 nt, synthetic construct
  source 1..23: mol_type = other RNA
  modified_base 1: mod_base = OTHER; note = 2'-O-methyluridine-3'-phosphate 5'phosphate
  modified_base 2: mod_base = OTHER; note = 2'-deoxy-2'-fluorouridine-3'-phosphate
  modified_base 3: mod_base = OTHER; note = 2'-O-methyluridine-3'-phosphate
  modified_base 4: mod_base = OTHER; note = 2'-O-methylcytidine-3'-phosphate
  modified_base 5: mod_base = OTHER; note = 2'-O-methyluridine-3'-phosphate
  modified_base 6: mod_base = OTHER; note = 2'-deoxy-2'-fluorouridine-3'-phosphate
  modified_base 7: mod_base = OTHER; note = 2'-O-methylguanosine-3'-phosphate
  modified_base 8: mod_base = OTHER; note = 2'-O-methyluridine-3'-phosphate
  modified_base 9: mod_base = OTHER; note = 2'-O-methyluridine-3'-phosphate
  modified_base 10: mod_base = OTHER; note = 2'-O-methyluridine-3'-phosphate
  modified_base 11: mod_base = OTHER; note = 2'-O-methylguanosine-3'-phosphate
  modified_base 12: mod_base = OTHER; note = 2'-O-methylguanosine-3'-phosphate
  modified_base 13: mod_base = OTHER; note = 2'-O-methyladenosine-3'-phosphate
  modified_base 14: mod_base = OTHER; note = 2'-deoxy-2'-fluoroadenosine-3'-phosphate
  modified_base 15: mod_base = OTHER; note = 2'-O-methyladenosine-3'-phosphate
  modified_base 16: mod_base = OTHER; note = 2'-deoxy-2'-fluorouridine-3'-phosphate
  modified_base 17: mod_base = OTHER; note = 2'-O-methyluridine-3'-phosphate
  modified_base 18: mod_base = OTHER; note = 2'-O-methyluridine-3'-phosphate
  modified_base 19: mod_base = OTHER; note = 2'-O-methylguanosine-3'-phosphate
  modified_base 20: mod_base = OTHER; note = 2'-O-methylguanosine-3'-phosphate
  modified_base 21: mod_base = OTHER; note = 2'-O-methyladenosine-3'-phosphate
  modified_base 22: mod_base = OTHER; note = 2'-O-methyladenosine-3'-phosphate
  modified_base 23: mod_base = OTHER; note = 2'-O-methylguanosine
tttcttgtttggaaatttggaag

SEQ ID NO: 4769 - RNA, 23 nt, synthetic construct
  source 1..23: mol_type = other RNA
  modified_base 1: mod_base = OTHER; note = 2'-O-methyluridine-3'-phosphate 5'phosphate
  modified_base 2: mod_base = OTHER; note = 2'-deoxy-2'-fluoroguanosine-3'-phosphate
  modified_base 3: mod_base = OTHER; note = 2'-O-methyluridine-3'-phosphate
  modified_base 4: mod_base = OTHER; note = 2'-O-methyluridine-3'-phosphate
  modified_base 5: mod_base = OTHER; note = 2'-O-methylcytidine-3'-phosphate
  modified_base 6: mod_base = OTHER; note = 2'-deoxy-2'-fluorouridine-3'-phosphate
  modified_base 7: mod_base = OTHER; note = 2'-O-methyluridine-3'-phosphate
  modified_base 8: mod_base = OTHER; note = 2'-O-methylguanosine-3'-phosphate
  modified_base 9: mod_base = OTHER; note = 2'-O-methyluridine-3'-phosphate
  modified_base 10: mod_base = OTHER; note = 2'-O-methyluridine-3'-phosphate
  modified_base 11: mod_base = OTHER; note = 2'-O-methyluridine-3'-phosphate
  modified_base 12: mod_base = OTHER; note = 2'-O-methylguanosine-3'-phosphate
  modified_base 13: mod_base = OTHER; note = 2'-O-methylguanosine-3'-phosphate
  modified_base 14: mod_base = OTHER; note = 2'-deoxy-2'-fluoroadenosine-3'-phosphate
  modified_base 15: mod_base = OTHER; note = 2'-O-methyladenosine-3'-phosphate
  modified_base 16: mod_base = OTHER; note = 2'-deoxy-2'-fluoroadenosine-3'-phosphate
  modified_base 17: mod_base = OTHER; note = 2'-O-methyluridine-3'-phosphate
  modified_base 18: mod_base = OTHER; note = 2'-O-methyluridine-3'-phosphate
  modified_base 19: mod_base = OTHER; note = 2'-O-methyluridine-3'-phosphate
  modified_base 20: mod_base = OTHER; note = 2'-O-methylguanosine-3'-phosphate
  modified_base 21: mod_base = OTHER; note = 2'-O-methylguanosine-3'-phosphate
  modified_base 22: mod_base = OTHER; note = 2'-O-methyladenosine-3'-phosphate
  modified_base 23: mod_base = OTHER; note = 2'-O-methyladenosine
tgttcttgtttggaaatttggaa

SEQ ID NO: 4770 - RNA, 23 nt, synthetic construct
  source 1..23: mol_type = other RNA
  modified_base 1: mod_base = OTHER; note = 2'-O-methyluridine-3'-phosphate 5'phosphate
  modified_base 2: mod_base = OTHER; note = 2'-deoxy-2'-fluoroguanosine-3'-phosphate
  modified_base 3: mod_base = OTHER; note = 2'-O-methylguanosine-3'-phosphate
  modified_base 4: mod_base = OTHER; note = 2'-O-methyluridine-3'-phosphate
  modified_base 5: mod_base = OTHER; note = 2'-O-methyluridine-3'-phosphate
  modified_base 6: mod_base = OTHER; note = 2'-deoxy-2'-fluorocytidine-3'-phosphate
  modified_base 7: mod_base = OTHER; note = 2'-O-methyluridine-3'-phosphate
  modified_base 8: mod_base = OTHER; note = 2'-O-methyluridine-3'-phosphate
  modified_base 9: mod_base = OTHER; note = 2'-O-methylguanosine-3'-phosphate
  modified_base 10: mod_base = OTHER; note = 2'-O-methyluridine-3'-phosphate
  modified_base 11: mod_base = OTHER; note = 2'-O-methyluridine-3'-phosphate
  modified_base 12: mod_base = OTHER; note = 2'-O-methyluridine-3'-phosphate
  modified_base 13: mod_base = OTHER; note = 2'-O-methylguanosine-3'-phosphate
  modified_base 14: mod_base = OTHER; note = 2'-deoxy-2'-fluoroguanosine-3'-phosphate
  modified_base 15: mod_base = OTHER; note = 2'-O-methyladenosine-3'-phosphate
  modified_base 16: mod_base = OTHER; note = 2'-deoxy-2'-fluoroadenosine-3'-phosphate
  modified_base 17: mod_base = OTHER; note = 2'-O-methyladenosine-3'-phosphate
  modified_base 18: mod_base = OTHER; note = 2'-O-methyluridine-3'-phosphate
  modified_base 19: mod_base = OTHER; note = 2'-O-methyluridine-3'-phosphate
  modified_base 20: mod_base = OTHER; note = 2'-O-methyluridine-3'-phosphate
  modified_base 21: mod_base = OTHER; note = 2'-O-methylguanosine-3'-phosphate
  modified_base 22: mod_base = OTHER; note = 2'-O-methylguanosine-3'-phosphate
  modified_base 23: mod_base = OTHER; note = 2'-O-methyladenosine
tggttcttgtttggaaatttgga

SEQ ID NO: 4771 - RNA, 23 nt, synthetic construct
  source 1..23: mol_type = other RNA
  modified_base 1: mod_base = OTHER; note = 2'-O-methyluridine-3'-phosphate 5'phosphate
  modified_base 2: mod_base = OTHER; note = 2'-deoxy-2'-fluoroadenosine-3'-phosphate
  modified_base 3: mod_base = OTHER; note = 2'-O-methylguanosine-3'-phosphate
  modified_base 4: mod_base = OTHER; note = 2'-O-methylguanosine-3'-phosphate
  modified_base 5: mod_base = OTHER; note = 2'-O-methyluridine-3'-phosphate
  modified_base 6: mod_base = OTHER; note = 2'-deoxy-2'-fluorouridine-3'-phosphate
  modified_base 7: mod_base = OTHER; note = 2'-O-methylcytidine-3'-phosphate
  modified_base 8: mod_base = OTHER; note = 2'-O-methyluridine-3'-phosphate
  modified_base 9: mod_base = OTHER; note = 2'-O-methyluridine-3'-phosphate
  modified_base 10: mod_base = OTHER; note = 2'-O-methylguanosine-3'-phosphate
  modified_base 11: mod_base = OTHER; note = 2'-O-methyluridine-3'-phosphate
  modified_base 12: mod_base = OTHER; note = 2'-O-methyluridine-3'-phosphate
  modified_base 13: mod_base = OTHER; note = 2'-O-methyluridine-3'-phosphate
  modified_base 14: mod_base = OTHER; note = 2'-deoxy-2'-fluoroguanosine-3'-phosphate
  modified_base 15: mod_base = OTHER; note = 2'-O-methylguanosine-3'-phosphate
  modified_base 16: mod_base = OTHER; note = 2'-deoxy-2'-fluoroadenosine-3'-phosphate
  modified_base 17: mod_base = OTHER; note = 2'-O-methyladenosine-3'-phosphate
  modified_base 18: mod_base = OTHER; note = 2'-O-methyladenosine-3'-phosphate
  modified_base 19: mod_base = OTHER; note = 2'-O-methyluridine-3'-phosphate
  modified_base 20: mod_base = OTHER; note = 2'-O-methyluridine-3'-phosphate
  modified_base 21: mod_base = OTHER; note = 2'-O-methyluridine-3'-phosphate
  modified_base 22: mod_base = OTHER; note = 2'-O-methylguanosine-3'-phosphate
  modified_base 23: mod_base = OTHER; note = 2'-O-methylguanosine
taggttcttgtttggaaatttgg

SEQ ID NO: 4772 - RNA, 23 nt, synthetic construct
  source 1..23: mol_type = other RNA
  modified_base 1: mod_base = OTHER; note = 2'-O-methyluridine-3'-phosphate 5'phosphate
  modified_base 2: mod_base = OTHER; note = 2'-deoxy-2'-fluorocytidine-3'-phosphate
  modified_base 3: mod_base = OTHER; note = 2'-O-methyladenosine-3'-phosphate
  modified_base 4: mod_base = OTHER; note = 2'-O-methylguanosine-3'-phosphate
  modified_base 5: mod_base = OTHER; note = 2'-O-methylguanosine-3'-phosphate
  modified_base 6: mod_base = OTHER; note = 2'-deoxy-2'-fluorouridine-3'-phosphate
  modified_base 7: mod_base = OTHER; note = 2'-O-methyluridine-3'-phosphate
  modified_base 8: mod_base = OTHER; note = 2'-O-methylcytidine-3'-phosphate
  modified_base 9: mod_base = OTHER; note = 2'-O-methyluridine-3'-phosphate
  modified_base 10: mod_base = OTHER; note = 2'-O-methyluridine-3'-phosphate
  modified_base 11: mod_base = OTHER; note = 2'-O-methylguanosine-3'-phosphate
  modified_base 12: mod_base = OTHER; note = 2'-O-methyluridine-3'-phosphate
  modified_base 13: mod_base = OTHER; note = 2'-O-methyluridine-3'-phosphate
  modified_base 14: mod_base = OTHER; note = 2'-deoxy-2'-fluorouridine-3'-phosphate
  modified_base 15: mod_base = OTHER; note = 2'-O-methylguanosine-3'-phosphate
  modified_base 16: mod_base = OTHER; note = 2'-deoxy-2'-fluoroguanosine-3'-phosphate
  modified_base 17: mod_base = OTHER; note = 2'-O-methyladenosine-3'-phosphate
  modified_base 18: mod_base = OTHER; note = 2'-O-methyladenosine-3'-phosphate
  modified_base 19: mod_base = OTHER; note = 2'-O-methyladenosine-3'-phosphate
  modified_base 20: mod_base = OTHER; note = 2'-O-methyluridine-3'-phosphate
  modified_base 21: mod_base = OTHER; note = 2'-O-methyluridine-3'-phosphate
  modified_base 22: mod_base = OTHER; note = 2'-O-methyluridine-3'-phosphate
  modified_base 23: mod_base = OTHER; note = 2'-O-methylguanosine
tcaggttcttgtttggaaatttg

SEQ ID NO: 4773 - RNA, 23 nt, synthetic construct
  source 1..23: mol_type = other RNA
  modified_base 1: mod_base = OTHER; note = 2'-O-methyluridine-3'-phosphate 5'phosphate
  modified_base 2: mod_base = OTHER; note = 2'-deoxy-2'-fluorouridine-3'-phosphate
  modified_base 3: mod_base = OTHER; note = 2'-O-methylcytidine-3'-phosphate
  modified_base 4: mod_base = OTHER; note = 2'-O-methyladenosine-3'-phosphate
  modified_base 5: mod_base = OTHER; note = 2'-O-methylguanosine-3'-phosphate
  modified_base 6: mod_base = OTHER; note = 2'-deoxy-2'-fluoroguanosine-3'-phosphate
  modified_base 7: mod_base = OTHER; note = 2'-O-methyluridine-3'-phosphate
  modified_base 8: mod_base = OTHER; note = 2'-O-methyluridine-3'-phosphate
  modified_base 9: mod_base = OTHER; note = 2'-O-methylcytidine-3'-phosphate
  modified_base 10: mod_base = OTHER; note = 2'-O-methyluridine-3'-phosphate
  modified_base 11: mod_base = OTHER; note = 2'-O-methyluridine-3'-phosphate
  modified_base 12: mod_base = OTHER; note = 2'-O-methylguanosine-3'-phosphate
  modified_base 13: mod_base = OTHER; note = 2'-O-methyluridine-3'-phosphate
  modified_base 14: mod_base = OTHER; note = 2'-deoxy-2'-fluorouridine-3'-phosphate
  modified_base 15: mod_base = OTHER; note = 2'-O-methyluridine-3'-phosphate
  modified_base 16: mod_base = OTHER; note = 2'-deoxy-2'-fluoroguanosine-3'-phosphate
  modified_base 17: mod_base = OTHER; note = 2'-O-methylguanosine-3'-phosphate
  modified_base 18: mod_base = OTHER; note = 2'-O-methyladenosine-3'-phosphate
  modified_base 19: mod_base = OTHER; note = 2'-O-methyladenosine-3'-phosphate
  modified_base 20: mod_base = OTHER; note = 2'-O-methyladenosine-3'-phosphate
  modified_base 21: mod_base = OTHER; note = 2'-O-methyluridine-3'-phosphate
  modified_base 22: mod_base = OTHER; note = 2'-O-methyluridine-3'-phosphate
  modified_base 23: mod_base = OTHER; note = 2'-O-methyluridine
ttcaggttcttgtttggaaattt

SEQ ID NO: 4774 - RNA, 23 nt, synthetic construct
  source 1..23: mol_type = other RNA
  modified_base 1: mod_base = OTHER; note = 2'-O-methyluridine-3'-phosphate 5'phosphate
  modified_base 2: mod_base = OTHER; note = 2'-deoxy-2'-fluorouridine-3'-phosphate
  modified_base 3: mod_base = OTHER; note = 2'-O-methyluridine-3'-phosphate
  modified_base 4: mod_base = OTHER; note = 2'-O-methylcytidine-3'-phosphate
  modified_base 5: mod_base = OTHER; note = 2'-O-methyladenosine-3'-phosphate
  modified_base 6: mod_base = OTHER; note = 2'-deoxy-2'-fluoroguanosine-3'-phosphate
  modified_base 7: mod_base = OTHER; note = 2'-O-methylguanosine-3'-phosphate
  modified_base 8: mod_base = OTHER; note = 2'-O-methyluridine-3'-phosphate
  modified_base 9: mod_base = OTHER; note = 2'-O-methyluridine-3'-phosphate
  modified_base 10: mod_base = OTHER; note = 2'-O-methylcytidine-3'-phosphate
  modified_base 11: mod_base = OTHER; note = 2'-O-methyluridine-3'-phosphate
  modified_base 12: mod_base = OTHER; note = 2'-O-methyluridine-3'-phosphate
  modified_base 13: mod_base = OTHER; note = 2'-O-methylguanosine-3'-phosphate
  modified_base 14: mod_base = OTHER; note = 2'-deoxy-2'-fluorouridine-3'-phosphate
  modified_base 15: mod_base = OTHER; note = 2'-O-methyluridine-3'-phosphate
  modified_base 16: mod_base = OTHER; note = 2'-deoxy-2'-fluorouridine-3'-phosphate
  modified_base 17: mod_base = OTHER; note = 2'-O-methylguanosine-3'-phosphate
  modified_base 18: mod_base = OTHER; note = 2'-O-methylguanosine-3'-phosphate
  modified_base 19: mod_base = OTHER; note = 2'-O-methyladenosine-3'-phosphate
  modified_base 20: mod_base = OTHER; note = 2'-O-methyladenosine-3'-phosphate
  modified_base 21: mod_base = OTHER; note = 2'-O-methyladenosine-3'-phosphate
  modified_base 22: mod_base = OTHER; note = 2'-O-methyluridine-3'-phosphate
  modified_base 23: mod_base = OTHER; note = 2'-O-methyluridine
tttcaggttcttgtttggaaatt

SEQ ID NO: 4775 - RNA, 23 nt, synthetic construct
  source 1..23: mol_type = other RNA
  modified_base 1: mod_base = OTHER; note = 2'-O-methyluridine-3'-phosphate 5'phosphate
  modified_base 2: mod_base = OTHER; note = 2'-deoxy-2'-fluorocytidine-3'-phosphate
  modified_base 3: mod_base = OTHER; note = 2'-O-methyluridine-3'-phosphate
  modified_base 4: mod_base = OTHER; note = 2'-O-methyluridine-3'-phosphate
  modified_base 5: mod_base = OTHER; note = 2'-O-methylcytidine-3'-phosphate
  modified_base 6: mod_base = OTHER; note = 2'-deoxy-2'-fluoroadenosine-3'-phosphate
  modified_base 7: mod_base = OTHER; note = 2'-O-methylguanosine-3'-phosphate
  modified_base 8: mod_base = OTHER; note = 2'-O-methylguanosine-3'-phosphate
  modified_base 9: mod_base = OTHER; note = 2'-O-methyluridine-3'-phosphate
  modified_base 10: mod_base = OTHER; note = 2'-O-methyluridine-3'-phosphate
  modified_base 11: mod_base = OTHER; note = 2'-O-methylcytidine-3'-phosphate
  modified_base 12: mod_base = OTHER; note = 2'-O-methyluridine-3'-phosphate
  modified_base 13: mod_base = OTHER; note = 2'-O-methyluridine-3'-phosphate
  modified_base 14: mod_base = OTHER; note = 2'-deoxy-2'-fluoroguanosine-3'-phosphate
  modified_base 15: mod_base = OTHER; note = 2'-O-methyluridine-3'-phosphate
  modified_base 16: mod_base = OTHER; note = 2'-deoxy-2'-fluorouridine-3'-phosphate
  modified_base 17: mod_base = OTHER; note = 2'-O-methyluridine-3'-phosphate
  modified_base 18: mod_base = OTHER; note = 2'-O-methylguanosine-3'-phosphate
  modified_base 19: mod_base = OTHER; note = 2'-O-methylguanosine-3'-phosphate
  modified_base 20: mod_base = OTHER; note = 2'-O-methyladenosine-3'-phosphate
  modified_base 21: mod_base = OTHER; note = 2'-O-methyladenosine-3'-phosphate
  modified_base 22: mod_base = OTHER; note = 2'-O-methyladenosine-3'-phosphate
  modified_base 23: mod_base = OTHER; note = 2'-O-methyluridine
tcttcaggttcttgtttggaaat

SEQ ID NO: 4776 - RNA, 23 nt, synthetic construct
  source 1..23: mol_type = other RNA
  modified_base 1: mod_base = OTHER; note = 2'-O-methyluridine-3'-phosphate 5'phosphate
  modified_base 2: mod_base = OTHER; note = 2'-deoxy-2'-fluorouridine-3'-phosphate
  modified_base 3: mod_base = OTHER; note = 2'-O-methylcytidine-3'-phosphate
  modified_base 4: mod_base = OTHER; note = 2'-O-methyluridine-3'-phosphate
  modified_base 5: mod_base = OTHER; note = 2'-O-methyluridine-3'-phosphate
  modified_base 6: mod_base = OTHER; note = 2'-deoxy-2'-fluorocytidine-3'-phosphate
  modified_base 7: mod_base = OTHER; note = 2'-O-methyladenosine-3'-phosphate
  modified_base 8: mod_base = OTHER; note = 2'-O-methylguanosine-3'-phosphate
  modified_base 9: mod_base = OTHER; note = 2'-O-methylguanosine-3'-phosphate
  modified_base 10: mod_base = OTHER; note = 2'-O-methyluridine-3'-phosphate
  modified_base 11: mod_base = OTHER; note = 2'-O-methyluridine-3'-phosphate
  modified_base 12: mod_base = OTHER; note = 2'-O-methylcytidine-3'-phosphate
  modified_base 13: mod_base = OTHER; note = 2'-O-methyluridine-3'-phosphate
  modified_base 14: mod_base = OTHER; note = 2'-deoxy-2'-fluorouridine-3'-phosphate
  modified_base 15: mod_base = OTHER; note = 2'-O-methylguanosine-3'-phosphate
  modified_base 16: mod_base = OTHER; note = 2'-deoxy-2'-fluorouridine-3'-phosphate
  modified_base 17: mod_base = OTHER; note = 2'-O-methyluridine-3'-phosphate
  modified_base 18: mod_base = OTHER; note = 2'-O-methyluridine-3'-phosphate
  modified_base 19: mod_base = OTHER; note = 2'-O-methylguanosine-3'-phosphate
  modified_base 20: mod_base = OTHER; note = 2'-O-methylguanosine-3'-phosphate
  modified_base 21: mod_base = OTHER; note = 2'-O-methyladenosine-3'-phosphate
  modified_base 22: mod_base = OTHER; note = 2'-O-methyladenosine-3'-phosphate
  modified_base 23: mod_base = OTHER; note = 2'-O-methyladenosine
ttcttcaggttcttgtttggaaa

SEQ ID NO: 4777 - RNA, 23 nt, synthetic construct
  source 1..23: mol_type = other RNA
  modified_base 1: mod_base = OTHER; note = 2'-O-methyluridine-3'-phosphate 5'phosphate
  modified_base 2: mod_base = OTHER; note = 2'-deoxy-2'-fluorouridine-3'-phosphate
  modified_base 3: mod_base = OTHER; note = 2'-O-methyluridine-3'-phosphate
  modified_base 4: mod_base = OTHER; note = 2'-O-methylcytidine-3'-phosphate
  modified_base 5: mod_base = OTHER; note = 2'-O-methyluridine-3'-phosphate
  modified_base 6: mod_base = OTHER; note = 2'-deoxy-2'-fluorouridine-3'-phosphate
  modified_base 7: mod_base = OTHER; note = 2'-O-methylcytidine-3'-phosphate
  modified_base 8: mod_base = OTHER; note = 2'-O-methyladenosine-3'-phosphate
  modified_base 9: mod_base = OTHER; note = 2'-O-methylguanosine-3'-phosphate
  modified_base 10: mod_base = OTHER; note = 2'-O-methylguanosine-3'-phosphate
  modified_base 11: mod_base = OTHER; note = 2'-O-methyluridine-3'-phosphate
  modified_base 12: mod_base = OTHER; note = 2'-O-methyluridine-3'-phosphate
  modified_base 13: mod_base = OTHER; note = 2'-O-methylcytidine-3'-phosphate
  modified_base 14: mod_base = OTHER; note = 2'-deoxy-2'-fluorouridine-3'-phosphate
  modified_base 15: mod_base = OTHER; note = 2'-O-methyluridine-3'-phosphate
  modified_base 16: mod_base = OTHER; note = 2'-deoxy-2'-fluoroguanosine-3'-phosphate
  modified_base 17: mod_base = OTHER; note = 2'-O-methyluridine-3'-phosphate
  modified_base 18: mod_base = OTHER; note = 2'-O-methyluridine-3'-phosphate
  modified_base 19: mod_base = OTHER; note = 2'-O-methyluridine-3'-phosphate
  modified_base 20: mod_base = OTHER; note = 2'-O-methylguanosine-3'-phosphate
  modified_base 21: mod_base = OTHER; note = 2'-O-methylguanosine-3'-phosphate
  modified_base 22: mod_base = OTHER; note = 2'-O-methyladenosine-3'-phosphate
  modified_base 23: mod_base = OTHER; note = 2'-O-methyladenosine
tttcttcaggttcttgtttggaa

SEQ ID NO: 4778 - RNA, 23 nt, synthetic construct
  source 1..23: mol_type = other RNA
  modified_base 1: mod_base = OTHER; note = 2'-O-methyluridine-3'-phosphate 5'phosphate
  modified_base 2: mod_base = OTHER; note = 2'-deoxy-2'-fluorocytidine-3'-phosphate
  modified_base 3: mod_base = OTHER; note = 2'-O-methyluridine-3'-phosphate
  modified_base 4: mod_base = OTHER; note = 2'-O-methyluridine-3'-phosphate
  modified_base 5: mod_base = OTHER; note = 2'-O-methylcytidine-3'-phosphate
  modified_base 6: mod_base = OTHER; note = 2'-deoxy-2'-fluorouridine-3'-phosphate
  modified_base 7: mod_base = OTHER; note = 2'-O-methyluridine-3'-phosphate
  modified_base 8: mod_base = OTHER; note = 2'-O-methylcytidine-3'-phosphate
  modified_base 9: mod_base = OTHER; note = 2'-O-methyladenosine-3'-phosphate
  modified_base 10: mod_base = OTHER; note = 2'-O-methylguanosine-3'-phosphate
  modified_base 11: mod_base = OTHER; note = 2'-O-methylguanosine-3'-phosphate
  modified_base 12: mod_base = OTHER; note = 2'-O-methyluridine-3'-phosphate
  modified_base 13: mod_base = OTHER; note = 2'-O-methyluridine-3'-phosphate
  modified_base 14: mod_base = OTHER; note = 2'-deoxy-2'-fluorocytidine-3'-phosphate
  modified_base 15: mod_base = OTHER; note = 2'-O-methyluridine-3'-phosphate
  modified_base 16: mod_base = OTHER; note = 2'-deoxy-2'-fluorouridine-3'-phosphate
  modified_base 17: mod_base = OTHER; note = 2'-O-methylguanosine-3'-phosphate
  modified_base 18: mod_base = OTHER; note = 2'-O-methyluridine-3'-phosphate
  modified_base 19: mod_base = OTHER; note = 2'-O-methyluridine-3'-phosphate
  modified_base 20: mod_base = OTHER; note = 2'-O-methyluridine-3'-phosphate
  modified_base 21: mod_base = OTHER; note = 2'-O-methylguanosine-3'-phosphate
  modified_base 22: mod_base = OTHER; note = 2'-O-methylguanosine-3'-phosphate
  modified_base 23: mod_base = OTHER; note = 2'-O-methyladenosine
tcttcttcaggttcttgtttgga

SEQ ID NO: 4779 - RNA, 23 nt, synthetic construct
  source 1..23: mol_type = other RNA
  modified_base 1: mod_base = OTHER; note = 2'-O-methyluridine-3'-phosphate 5'phosphate
  modified_base 2: mod_base = OTHER; note = 2'-deoxy-2'-fluorouridine-3'-phosphate
  modified_base 3: mod_base = OTHER; note = 2'-O-methylcytidine-3'-phosphate
  modified_base 4: mod_base = OTHER; note = 2'-O-methyluridine-3'-phosphate
  modified_base 5: mod_base = OTHER; note = 2'-O-methyluridine-3'-phosphate
  modified_base 6: mod_base = OTHER; note = 2'-deoxy-2'-fluorocytidine-3'-phosphate
  modified_base 7: mod_base = OTHER; note = 2'-O-methyluridine-3'-phosphate
  modified_base 8: mod_base = OTHER; note = 2'-O-methyluridine-3'-phosphate
  modified_base 9: mod_base = OTHER; note = 2'-O-methylcytidine-3'-phosphate
  modified_base 10: mod_base = OTHER; note = 2'-O-methyladenosine-3'-phosphate
  modified_base 11: mod_base = OTHER; note = 2'-O-methylguanosine-3'-phosphate
  modified_base 12: mod_base = OTHER; note = 2'-O-methylguanosine-3'-phosphate
  modified_base 13: mod_base = OTHER; note = 2'-O-methyluridine-3'-phosphate
  modified_base 14: mod_base = OTHER; note = 2'-deoxy-2'-fluorouridine-3'-phosphate
  modified_base 15: mod_base = OTHER; note = 2'-O-methylcytidine-3'-phosphate
  modified_base 16: mod_base = OTHER; note = 2'-deoxy-2'-fluorouridine-3'-phosphate
  modified_base 17: mod_base = OTHER; note = 2'-O-methyluridine-3'-phosphate
  modified_base 18: mod_base = OTHER; note = 2'-O-methylguanosine-3'-phosphate
  modified_base 19: mod_base = OTHER; note = 2'-O-methyluridine-3'-phosphate
  modified_base 20: mod_base = OTHER; note = 2'-O-methyluridine-3'-phosphate
  modified_base 21: mod_base = OTHER; note = 2'-O-methyluridine-3'-phosphate
  modified_base 22: mod_base = OTHER; note = 2'-O-methylguanosine-3'-phosphate
  modified_base 23: mod_base = OTHER; note = 2'-O-methylguanosine
ttcttcttcaggttcttgtttgg

SEQ ID NO: 4780 - RNA, 23 nt, synthetic construct
  source 1..23: mol_type = other RNA
  modified_base 1: mod_base = OTHER; note = 2'-O-methyluridine-3'-phosphate 5'phosphate
  modified_base 2: mod_base = OTHER; note = 2'-deoxy-2'-fluorouridine-3'-phosphate
  modified_base 3: mod_base = OTHER; note = 2'-O-methyluridine-3'-phosphate
  modified_base 4: mod_base = OTHER; note = 2'-O-methylcytidine-3'-phosphate
  modified_base 5: mod_base = OTHER; note = 2'-O-methyluridine-3'-phosphate
  modified_base 6: mod_base = OTHER; note = 2'-deoxy-2'-fluorouridine-3'-phosphate
  modified_base 7: mod_base = OTHER; note = 2'-O-methylcytidine-3'-phosphate
  modified_base 8: mod_base = OTHER; note = 2'-O-methyluridine-3'-phosphate
  modified_base 9: mod_base = OTHER; note = 2'-O-methyluridine-3'-phosphate
  modified_base 10: mod_base = OTHER; note = 2'-O-methylcytidine-3'-phosphate
  modified_base 11: mod_base = OTHER; note = 2'-O-methyladenosine-3'-phosphate
  modified_base 12: mod_base = OTHER; note = 2'-O-methylguanosine-3'-phosphate
  modified_base 13: mod_base = OTHER; note = 2'-O-methylguanosine-3'-phosphate
  modified_base 14: mod_base = OTHER; note = 2'-deoxy-2'-fluorouridine-3'-phosphate
  modified_base 15: mod_base = OTHER; note = 2'-O-methyluridine-3'-phosphate
  modified_base 16: mod_base = OTHER; note = 2'-deoxy-2'-fluorocytidine-3'-phosphate
  modified_base 17: mod_base = OTHER; note = 2'-O-methyluridine-3'-phosphate
  modified_base 18: mod_base = OTHER; note = 2'-O-methyluridine-3'-phosphate
  modified_base 19: mod_base = OTHER; note = 2'-O-methylguanosine-3'-phosphate
  modified_base 20: mod_base = OTHER; note = 2'-O-methyluridine-3'-phosphate
  modified_base 21: mod_base = OTHER; note = 2'-O-methyluridine-3'-phosphate
  modified_base 22: mod_base = OTHER; note = 2'-O-methyluridine-3'-phosphate
  modified_base 23: mod_base = OTHER; note = 2'-O-methylguanosine
tttcttcttcaggttcttgtttg

SEQ ID NO: 4781 - RNA, 23 nt, synthetic construct
  source 1..23: mol_type = other RNA
  modified_base 1: mod_base = OTHER; note = 2'-O-methyluridine-3'-phosphate 5'phosphate
  modified_base 2: mod_base = OTHER; note = 2'-deoxy-2'-fluoroadenosine-3'-phosphate
  modified_base 3: mod_base = OTHER; note = 2'-O-methyluridine-3'-phosphate
  modified_base 4: mod_base = OTHER; note = 2'-O-methyluridine-3'-phosphate
  modified_base 5: mod_base = OTHER; note = 2'-O-methylcytidine-3'-phosphate
  modified_base 6: mod_base = OTHER; note = 2'-deoxy-2'-fluorouridine-3'-phosphate
  modified_base 7: mod_base = OTHER; note = 2'-O-methyluridine-3'-phosphate
  modified_base 8: mod_base = OTHER; note = 2'-O-methylcytidine-3'-phosphate
  modified_base 9: mod_base = OTHER; note = 2'-O-methyluridine-3'-phosphate
  modified_base 10: mod_base = OTHER; note = 2'-O-methyluridine-3'-phosphate
  modified_base 11: mod_base = OTHER; note = 2'-O-methylcytidine-3'-phosphate
  modified_base 12: mod_base = OTHER; note = 2'-O-methyladenosine-3'-phosphate
  modified_base 13: mod_base = OTHER; note = 2'-O-methylguanosine-3'-phosphate
  modified_base 14: mod_base = OTHER; note = 2'-deoxy-2'-fluoroguanosine-3'-phosphate
  modified_base 15: mod_base = OTHER; note = 2'-O-methyluridine-3'-phosphate
  modified_base 16: mod_base = OTHER; note = 2'-deoxy-2'-fluorouridine-3'-phosphate
  modified_base 17: mod_base = OTHER; note = 2'-O-methylcytidine-3'-phosphate
  modified_base 18: mod_base = OTHER; note = 2'-O-methyluridine-3'-phosphate
  modified_base 19: mod_base = OTHER; note = 2'-O-methyluridine-3'-phosphate
  modified_base 20: mod_base = OTHER; note = 2'-O-methylguanosine-3'-phosphate
  modified_base 21: mod_base = OTHER; note = 2'-O-methyluridine-3'-phosphate
  modified_base 22: mod_base = OTHER; note = 2'-O-methyluridine-3'-phosphate
  modified_base 23: mod_base = OTHER; note = 2'-O-methyluridine
tattcttcttcaggttcttgttt

SEQ ID NO: 4782 - RNA, 23 nt, synthetic construct
  source 1..23: mol_type = other RNA
  modified_base 1: mod_base = OTHER; note = 2'-O-methyluridine-3'-phosphate 5'phosphate
  modified_base 2: mod_base = OTHER; note = 2'-deoxy-2'-fluoroadenosine-3'-phosphate
  modified_base 3: mod_base = OTHER; note = 2'-O-methyladenosine-3'-phosphate
  modified_base 4: mod_base = OTHER; note = 2'-O-methyluridine-3'-phosphate
  modified_base 5: mod_base = OTHER; note = 2'-O-methyluridine-3'-phosphate
  modified_base 6: mod_base = OTHER; note = 2'-deoxy-2'-fluorocytidine-3'-phosphate
  modified_base 7: mod_base = OTHER; note = 2'-O-methyluridine-3'-phosphate
  modified_base 8: mod_base = OTHER; note = 2'-O-methyluridine-3'-phosphate
  modified_base 9: mod_base = OTHER; note = 2'-O-methylcytidine-3'-phosphate
  modified_base 10: mod_base = OTHER; note = 2'-O-methyluridine-3'-phosphate
  modified_base 11: mod_base = OTHER; note = 2'-O-methyluridine-3'-phosphate
  modified_base 12: mod_base = OTHER; note = 2'-O-methylcytidine-3'-phosphate
  modified_base 13: mod_base = OTHER; note = 2'-O-methyladenosine-3'-phosphate
  modified_base 14: mod_base = OTHER; note = 2'-deoxy-2'-fluoroguanosine-3'-phosphate
  modified_base 15: mod_base = OTHER; note = 2'-O-methylguanosine-3'-phosphate
  modified_base 16: mod_base = OTHER; note = 2'-deoxy-2'-fluorouridine-3'-phosphate
  modified_base 17: mod_base = OTHER; note = 2'-O-methyluridine-3'-phosphate
  modified_base 18: mod_base = OTHER; note = 2'-O-methylcytidine-3'-phosphate
  modified_base 19: mod_base = OTHER; note = 2'-O-methyluridine-3'-phosphate
  modified_base 20: mod_base = OTHER; note = 2'-O-methyluridine-3'-phosphate
  modified_base 21: mod_base = OTHER; note = 2'-O-methylguanosine-3'-phosphate
  modified_base 22: mod_base = OTHER; note = 2'-O-methyluridine-3'-phosphate
  modified_base 23: mod_base = OTHER; note = 2'-O-methyluridine
taattcttcttcaggttcttgtt

SEQ ID NO: 4783 - RNA, 23 nt, synthetic construct
  source 1..23: mol_type = other RNA
  modified_base 1: mod_base = OTHER; note = 2'-O-methyluridine-3'-phosphate 5'phosphate
  modified_base 2: mod_base = OTHER; note = 2'-deoxy-2'-fluorouridine-3'-phosphate
  modified_base 3: mod_base = OTHER; note = 2'-O-methyladenosine-3'-phosphate
  modified_base 4: mod_base = OTHER; note = 2'-O-methyladenosine-3'-phosphate
  modified_base 5: mod_base = OTHER; note = 2'-O-methyluridine-3'-phosphate
  modified_base 6: mod_base = OTHER; note = 2'-deoxy-2'-fluorouridine-3'-phosphate
  modified_base 7: mod_base = OTHER; note = 2'-O-methylcytidine-3'-phosphate
  modified_base 8: mod_base = OTHER; note = 2'-O-methyluridine-3'-phosphate
  modified_base 9: mod_base = OTHER; note = 2'-O-methyluridine-3'-phosphate
  modified_base 10: mod_base = OTHER; note = 2'-O-methylcytidine-3'-phosphate
  modified_base 11: mod_base = OTHER; note = 2'-O-methyluridine-3'-phosphate
  modified_base 12: mod_base = OTHER; note = 2'-O-methyluridine-3'-phosphate
  modified_base 13: mod_base = OTHER; note = 2'-O-methylcytidine-3'-phosphate
  modified_base 14: mod_base = OTHER; note = 2'-deoxy-2'-fluoroadenosine-3'-phosphate
  modified_base 15: mod_base = OTHER; note = 2'-O-methylguanosine-3'-phosphate
  modified_base 16: mod_base = OTHER; note = 2'-deoxy-2'-fluoroguanosine-3'-phosphate
  modified_base 17: mod_base = OTHER; note = 2'-O-methyluridine-3'-phosphate
  modified_base 18: mod_base = OTHER; note = 2'-O-methyluridine-3'-phosphate
  modified_base 19: mod_base = OTHER; note = 2'-O-methylcytidine-3'-phosphate
  modified_base 20: mod_base = OTHER; note = 2'-O-methyluridine-3'-phosphate
  modified_base 21: mod_base = OTHER; note = 2'-O-methyluridine-3'-phosphate
  modified_base 22: mod_base = OTHER; note = 2'-O-methylguanosine-3'-phosphate
  modified_base 23: mod_base = OTHER; note = 2'-O-methyluridine
ttaattcttcttcaggttcttgt

SEQ ID NO: 4784 - RNA, 23 nt, synthetic construct
  source 1..23: mol_type = other RNA
  modified_base 1: mod_base = OTHER; note = 2'-O-methyluridine-3'-phosphate 5'phosphate
  modified_base 2: mod_base = OTHER; note = 2'-deoxy-2'-fluoroguanosine-3'-phosphate
  modified_base 3: mod_base = OTHER; note = 2'-O-methyluridine-3'-phosphate
  modified_base 4: mod_base = OTHER; note = 2'-O-methyladenosine-3'-phosphate
  modified_base 5: mod_base = OTHER; note = 2'-O-methyladenosine-3'-phosphate
  modified_base 6: mod_base = OTHER; note = 2'-deoxy-2'-fluorouridine-3'-phosphate
  modified_base 7: mod_base = OTHER; note = 2'-O-methyluridine-3'-phosphate
  modified_base 8: mod_base = OTHER; note = 2'-O-methylcytidine-3'-phosphate
  modified_base 9: mod_base = OTHER; note = 2'-O-methyluridine-3'-phosphate
  modified_base 10: mod_base = OTHER; note = 2'-O-methyluridine-3'-phosphate
  modified_base 11: mod_base = OTHER; note = 2'-O-methylcytidine-3'-phosphate
  modified_base 12: mod_base = OTHER; note = 2'-O-methyluridine-3'-phosphate
  modified_base 13: mod_base = OTHER; note = 2'-O-methyluridine-3'-phosphate
  modified_base 14: mod_base = OTHER; note = 2'-deoxy-2'-fluorocytidine-3'-phosphate
  modified_base 15: mod_base = OTHER; note = 2'-O-methyladenosine-3'-phosphate
  modified_base 16: mod_base = OTHER; note = 2'-deoxy-2'-fluoroguanosine-3'-phosphate
  modified_base 17: mod_base = OTHER; note = 2'-O-methylguanosine-3'-phosphate
  modified_base 18: mod_base = OTHER; note = 2'-O-methyluridine-3'-phosphate
  modified_base 19: mod_base = OTHER; note = 2'-O-methyluridine-3'-phosphate
  modified_base 20: mod_base = OTHER; note = 2'-O-methylcytidine-3'-phosphate
  modified_base 21: mod_base = OTHER; note = 2'-O-methyluridine-3'-phosphate
  modified_base 22: mod_base = OTHER; note = 2'-O-methyluridine-3'-phosphate
  modified_base 23: mod_base = OTHER; note = 2'-O-methylguanosine
tgtaattcttcttcaggttcttg

SEQ ID NO: 4785 - RNA, 23 nt, synthetic construct
  source 1..23: mol_type = other RNA
  modified_base 1: mod_base = OTHER; note = 2'-O-methyluridine-3'-phosphate 5'phosphate
  modified_base 2: mod_base = OTHER; note = 2'-deoxy-2'-fluoroadenosine-3'-phosphate
  modified_base 3: mod_base = OTHER; note = 2'-O-methylguanosine-3'-phosphate
  modified_base 4: mod_base = OTHER; note = 2'-O-methyluridine-3'-phosphate
  modified_base 5: mod_base = OTHER; note = 2'-O-methyladenosine-3'-phosphate
  modified_base 6: mod_base = OTHER; note = 2'-deoxy-2'-fluoroadenosine-3'-phosphate
  modified_base 7: mod_base = OTHER; note = 2'-O-methyluridine-3'-phosphate
  modified_base 8: mod_base = OTHER; note = 2'-O-methyluridine-3'-phosphate
  modified_base 9: mod_base = OTHER; note = 2'-O-methylcytidine-3'-phosphate
  modified_base 10: mod_base = OTHER; note = 2'-O-methyluridine-3'-phosphate
  modified_base 11: mod_base = OTHER; note = 2'-O-methyluridine-3'-phosphate
  modified_base 12: mod_base = OTHER; note = 2'-O-methylcytidine-3'-phosphate
  modified_base 13: mod_base = OTHER; note = 2'-O-methyluridine-3'-phosphate
  modified_base 14: mod_base = OTHER; note = 2'-deoxy-2'-fluorouridine-3'-phosphate
  modified_base 15: mod_base = OTHER; note = 2'-O-methylcytidine-3'-phosphate
  modified_base 16: mod_base = OTHER; note = 2'-deoxy-2'-fluoroadenosine-3'-phosphate
  modified_base 17: mod_base = OTHER; note = 2'-O-methylguanosine-3'-phosphate
  modified_base 18: mod_base = OTHER; note = 2'-O-methylguanosine-3'-phosphate
  modified_base 19: mod_base = OTHER; note = 2'-O-methyluridine-3'-phosphate
  modified_base 20: mod_base = OTHER; note = 2'-O-methyluridine-3'-phosphate
  modified_base 21: mod_base = OTHER; note = 2'-O-methylcytidine-3'-phosphate
  modified_base 22: mod_base = OTHER; note = 2'-O-methyluridine-3'-phosphate
  modified_base 23: mod_base = OTHER; note = 2'-O-methyluridine
tagtaattcttcttcaggttctt

SEQ ID NO: 4786 - RNA, 23 nt, synthetic construct
  source 1..23: mol_type = other RNA
  modified_base 1: mod_base = OTHER; note = 2'-O-methyluridine-3'-phosphate 5'phosphate
  modified_base 2: mod_base = OTHER; note = 2'-deoxy-2'-fluorocytidine-3'-phosphate
  modified_base 3: mod_base = OTHER; note = 2'-O-methyladenosine-3'-phosphate
  modified_base 4: mod_base = OTHER; note = 2'-O-methylguanosine-3'-phosphate
  modified_base 5: mod_base = OTHER; note = 2'-O-methyluridine-3'-phosphate
  modified_base 6: mod_base = OTHER; note = 2'-deoxy-2'-fluoroadenosine-3'-phosphate
  modified_base 7: mod_base = OTHER; note = 2'-O-methyladenosine-3'-phosphate
  modified_base 8: mod_base = OTHER; note = 2'-O-methyluridine-3'-phosphate
  modified_base 9: mod_base = OTHER; note = 2'-O-methyluridine-3'-phosphate
  modified_base 10: mod_base = OTHER; note = 2'-O-methylcytidine-3'-phosphate
  modified_base 11: mod_base = OTHER; note = 2'-O-methyluridine-3'-phosphate
  modified_base 12: mod_base = OTHER; note = 2'-O-methyluridine-3'-phosphate
  modified_base 13: mod_base = OTHER; note = 2'-O-methylcytidine-3'-phosphate
  modified_base 14: mod_base = OTHER; note = 2'-deoxy-2'-fluorouridine-3'-phosphate
  modified_base 15: mod_base = OTHER; note = 2'-O-methyluridine-3'-phosphate
  modified_base 16: mod_base = OTHER; note = 2'-deoxy-2'-fluorocytidine-3'-phosphate
  modified_base 17: mod_base = OTHER; note = 2'-O-methyladenosine-3'-phosphate
  modified_base 18: mod_base = OTHER; note = 2'-O-methylguanosine-3'-phosphate
  modified_base 19: mod_base = OTHER; note = 2'-O-methylguanosine-3'-phosphate
  modified_base 20: mod_base = OTHER; note = 2'-O-methyluridine-3'-phosphate
  modified_base 21: mod_base = OTHER; note = 2'-O-methyluridine-3'-phosphate
  modified_base 22: mod_base = OTHER; note = 2'-O-methylcytidine-3'-phosphate
  modified_base 23: mod_base = OTHER; note = 2'-O-methyluridine
tcagtaattcttcttcaggttct

SEQ ID NO: 4787 - RNA, 23 nt, synthetic construct
  source 1..23: mol_type = other RNA
  modified_base 1: mod_base = OTHER; note = 2'-O-methyluridine-3'-phosphate 5'phosphate
  modified_base 2: mod_base = OTHER; note = 2'-deoxy-2'-fluoroadenosine-3'-phosphate
  modified_base 3: mod_base = OTHER; note = 2'-O-methylcytidine-3'-phosphate
  modified_base 4: mod_base = OTHER; note = 2'-O-methyladenosine-3'-phosphate
  modified_base 5: mod_base = OTHER; note = 2'-O-methylguanosine-3'-phosphate
  modified_base 6: mod_base = OTHER; note = 2'-deoxy-2'-fluorouridine-3'-phosphate
  modified_base 7: mod_base = OTHER; note = 2'-O-methyladenosine-3'-phosphate
  modified_base 8: mod_base = OTHER; note = 2'-O-methyladenosine-3'-phosphate
  modified_base 9: mod_base = OTHER; note = 2'-O-methyluridine-3'-phosphate
  modified_base 10: mod_base = OTHER; note = 2'-O-methyluridine-3'-phosphate
  modified_base 11: mod_base = OTHER; note = 2'-O-methylcytidine-3'-phosphate
  modified_base 12: mod_base = OTHER; note = 2'-O-methyluridine-3'-phosphate
  modified_base 13: mod_base = OTHER; note = 2'-O-methyluridine-3'-phosphate
  modified_base 14: mod_base = OTHER; note = 2'-deoxy-2'-fluorocytidine-3'-phosphate
  modified_base 15: mod_base = OTHER; note = 2'-O-methyluridine-3'-phosphate
  modified_base 16: mod_base = OTHER; note = 2'-deoxy-2'-fluorouridine-3'-phosphate
  modified_base 17: mod_base = OTHER; note = 2'-O-methylcytidine-3'-phosphate
  modified_base 18: mod_base = OTHER; note = 2'-O-methyladenosine-3'-phosphate
  modified_base 19: mod_base = OTHER; note = 2'-O-methylguanosine-3'-phosphate
  modified_base 20: mod_base = OTHER; note = 2'-O-methylguanosine-3'-phosphate
  modified_base 21: mod_base = OTHER; note = 2'-O-methyluridine-3'-phosphate
  modified_base 22: mod_base = OTHER; note = 2'-O-methyluridine-3'-phosphate
  modified_base 23: mod_base = OTHER; note = 2'-O-methylcytidine
tacagtaattcttcttcaggttc

SEQ ID NO: 4788 - RNA, 23 nt, synthetic construct
  source 1..23: mol_type = other RNA
  modified_base 1: mod_base = OTHER; note = 2'-O-methyluridine-3'-phosphate 5'phosphate
  modified_base 2: mod_base = OTHER; note = 2'-deoxy-2'-fluoroguanosine-3'-phosphate
  modified_base 3: mod_base = OTHER; note = 2'-O-methyladenosine-3'-phosphate
  modified_base 4: mod_base = OTHER; note = 2'-O-methylcytidine-3'-phosphate
  modified_base 5: mod_base = OTHER; note = 2'-O-methyladenosine-3'-phosphate
  modified_base 6: mod_base = OTHER; note = 2'-deoxy-2'-fluoroguanosine-3'-phosphate
  modified_base 7: mod_base = OTHER; note = 2'-O-methyluridine-3'-phosphate
  modified_base 8: mod_base = OTHER; note = 2'-O-methyladenosine-3'-phosphate
  modified_base 9: mod_base = OTHER; note = 2'-O-methyladenosine-3'-phosphate
  modified_base 10: mod_base = OTHER; note = 2'-O-methyluridine-3'-phosphate
  modified_base 11: mod_base = OTHER; note = 2'-O-methyluridine-3'-phosphate
  modified_base 12: mod_base = OTHER; note = 2'-O-methylcytidine-3'-phosphate
  modified_base 13: mod_base = OTHER; note = 2'-O-methyluridine-3'-phosphate
  modified_base 14: mod_base = OTHER; note = 2'-deoxy-2'-fluorouridine-3'-phosphate
  modified_base 15: mod_base = OTHER; note = 2'-O-methylcytidine-3'-phosphate
  modified_base 16: mod_base = OTHER; note = 2'-deoxy-2'-fluorouridine-3'-phosphate
  modified_base 17: mod_base = OTHER; note = 2'-O-methyluridine-3'-phosphate
  modified_base 18: mod_base = OTHER; note = 2'-O-methylcytidine-3'-phosphate
  modified_base 19: mod_base = OTHER; note = 2'-O-methyladenosine-3'-phosphate
  modified_base 20: mod_base = OTHER; note = 2'-O-methylguanosine-3'-phosphate
  modified_base 21: mod_base = OTHER; note = 2'-O-methylguanosine-3'-phosphate
  modified_base 22: mod_base = OTHER; note = 2'-O-methyluridine-3'-phosphate
  modified_base 23: mod_base = OTHER; note = 2'-O-methyluridine
tgacagtaattcttcttcaggtt

SEQ ID NO: 4789 - RNA, 23 nt, synthetic construct
  source 1..23: mol_type = other RNA
  modified_base 1: mod_base = OTHER; note = 2'-O-methyluridine-3'-phosphate 5'phosphate
  modified_base 2: mod_base = OTHER; note = 2'-deoxy-2'-fluorocytidine-3'-phosphate
  modified_base 3: mod_base = OTHER; note = 2'-O-methylguanosine-3'-phosphate
  modified_base 4: mod_base = OTHER; note = 2'-O-methyladenosine-3'-phosphate
  modified_base 5: mod_base = OTHER; note = 2'-O-methylcytidine-3'-phosphate
  modified_base 6: mod_base = OTHER; note = 2'-deoxy-2'-fluoroadenosine-3'-phosphate
  modified_base 7: mod_base = OTHER; note = 2'-O-methylguanosine-3'-phosphate
  modified_base 8: mod_base = OTHER; note = 2'-O-methyluridine-3'-phosphate
  modified_base 9: mod_base = OTHER; note = 2'-O-methyladenosine-3'-phosphate
  modified_base 10: mod_base = OTHER; note = 2'-O-methyladenosine-3'-phosphate
  modified_base 11: mod_base = OTHER; note = 2'-O-methyluridine-3'-phosphate
  modified_base 12: mod_base = OTHER; note = 2'-O-methyluridine-3'-phosphate
  modified_base 13: mod_base = OTHER; note = 2'-O-methylcytidine-3'-phosphate
  modified_base 14: mod_base = OTHER; note = 2'-deoxy-2'-fluorouridine-3'-phosphate
  modified_base 15: mod_base = OTHER; note = 2'-O-methyluridine-3'-phosphate
  modified_base 16: mod_base = OTHER; note = 2'-deoxy-2'-fluorocytidine-3'-phosphate
  modified_base 17: mod_base = OTHER; note = 2'-O-methyluridine-3'-phosphate
  modified_base 18: mod_base = OTHER; note = 2'-O-methyluridine-3'-phosphate
  modified_base 19: mod_base = OTHER; note = 2'-O-methylcytidine-3'-phosphate
  modified_base 20: mod_base = OTHER; note = 2'-O-methyladenosine-3'-phosphate
  modified_base 21: mod_base = OTHER; note = 2'-O-methylguanosine-3'-phosphate
  modified_base 22: mod_base = OTHER; note = 2'-O-methylguanosine-3'-phosphate
  modified_base 23: mod_base = OTHER; note = 2'-O-methyluridine
tcgacagtaattcttcttcaggt

SEQ ID NO: 4790 - RNA, 23 nt, synthetic construct
  source 1..23: mol_type = other RNA
  modified_base 1: mod_base = OTHER; note = 2'-O-methyluridine-3'-phosphate 5'phosphate
  modified_base 2: mod_base = OTHER; note = 2'-deoxy-2'-fluoroadenosine-3'-phosphate
  modified_base 3: mod_base = OTHER; note = 2'-O-methylcytidine-3'-phosphate
  modified_base 4: mod_base = OTHER; note = 2'-O-methylguanosine-3'-phosphate
  modified_base 5: mod_base = OTHER; note = 2'-O-methyladenosine-3'-phosphate
  modified_base 6: mod_base = OTHER; note = 2'-deoxy-2'-fluorocytidine-3'-phosphate
  modified_base 7: mod_base = OTHER; note = 2'-O-methyladenosine-3'-phosphate
  modified_base 8: mod_base = OTHER; note = 2'-O-methylguanosine-3'-phosphate
  modified_base 9: mod_base = OTHER; note = 2'-O-methyluridine-3'-phosphate
  modified_base 10: mod_base = OTHER; note = 2'-O-methyladenosine-3'-phosphate
  modified_base 11: mod_base = OTHER; note = 2'-O-methyladenosine-3'-phosphate
  modified_base 12: mod_base = OTHER; note = 2'-O-methyluridine-3'-phosphate
  modified_base 13: mod_base = OTHER; note = 2'-O-methyluridine-3'-phosphate
  modified_base 14: mod_base = OTHER; note = 2'-deoxy-2'-fluorocytidine-3'-phosphate
  modified_base 15: mod_base = OTHER; note = 2'-O-methyluridine-3'-phosphate
  modified_base 16: mod_base = OTHER; note = 2'-deoxy-2'-fluorouridine-3'-phosphate
  modified_base 17: mod_base = OTHER; note = 2'-O-methylcytidine-3'-phosphate
  modified_base 18: mod_base = OTHER; note = 2'-O-methyluridine-3'-phosphate
  modified_base 19: mod_base = OTHER; note = 2'-O-methyluridine-3'-phosphate
  modified_base 20: mod_base = OTHER; note = 2'-O-methylcytidine-3'-phosphate
  modified_base 21: mod_base = OTHER; note = 2'-O-methyladenosine-3'-phosphate
  modified_base 22: mod_base = OTHER; note = 2'-O-methylguanosine-3'-phosphate
  modified_base 23: mod_base = OTHER; note = 2'-O-methylguanosine
tacgacagtaattcttcttcagg

SEQ ID NO: 4791 - RNA, 23 nt, synthetic construct
  source 1..23: mol_type = other RNA
  modified_base 1: mod_base = OTHER; note = 2'-O-methyluridine-3'-phosphate 5'phosphate
  modified_base 2: mod_base = OTHER; note = 2'-deoxy-2'-fluorouridine-3'-phosphate
  modified_base 3: mod_base = OTHER; note = 2'-O-methyladenosine-3'-phosphate
  modified_base 4: mod_base = OTHER; note = 2'-O-methylcytidine-3'-phosphate
  modified_base 5: mod_base = OTHER; note = 2'-O-methylguanosine-3'-phosphate
  modified_base 6: mod_base = OTHER; note = 2'-deoxy-2'-fluoroadenosine-3'-phosphate
  modified_base 7: mod_base = OTHER; note = 2'-O-methylcytidine-3'-phosphate
  modified_base 8: mod_base = OTHER; note = 2'-O-methyladenosine-3'-phosphate
  modified_base 9: mod_base = OTHER; note = 2'-O-methylguanosine-3'-phosphate
  modified_base 10: mod_base = OTHER; note = 2'-O-methyluridine-3'-phosphate
  modified_base 11: mod_base = OTHER; note = 2'-O-methyladenosine-3'-phosphate
  modified_base 12: mod_base = OTHER; note = 2'-O-methyladenosine-3'-phosphate
  modified_base 13: mod_base = OTHER; note = 2'-O-methyluridine-3'-phosphate
  modified_base 14: mod_base = OTHER; note = 2'-deoxy-2'-fluorouridine-3'-phosphate
  modified_base 15: mod_base = OTHER; note = 2'-O-methylcytidine-3'-phosphate
  modified_base 16: mod_base = OTHER; note = 2'-deoxy-2'-fluorouridine-3'-phosphate
  modified_base 17: mod_base = OTHER; note = 2'-O-methyluridine-3'-phosphate
  modified_base 18: mod_base = OTHER; note = 2'-O-methylcytidine-3'-phosphate
  modified_base 19: mod_base = OTHER; note = 2'-O-methyluridine-3'-phosphate
  modified_base 20: mod_base = OTHER; note = 2'-O-methyluridine-3'-phosphate
  modified_base 21: mod_base = OTHER; note = 2'-O-methylcytidine-3'-phosphate
  modified_base 22: mod_base = OTHER; note = 2'-O-methyladenosine-3'-phosphate
  modified_base 23: mod_base = OTHER; note = 2'-O-methylguanosine
ttacgacagtaattcttcttcag

SEQ ID NO: 4792 - RNA, 23 nt, synthetic construct
  source 1..23: mol_type = other RNA
  modified_base 1: mod_base = OTHER; note = 2'-O-methyluridine-3'-phosphate 5'phosphate
  modified_base 2: mod_base = OTHER; note = 2'-deoxy-2'-fluorouridine-3'-phosphate
  modified_base 3: mod_base = OTHER; note = 2'-O-methyluridine-3'-phosphate
  modified_base 4: mod_base = OTHER; note = 2'-O-methyladenosine-3'-phosphate
  modified_base 5: mod_base = OTHER; note = 2'-O-methylcytidine-3'-phosphate
  modified_base 6: mod_base = OTHER; note = 2'-deoxy-2'-fluoroguanosine-3'-phosphate
  modified_base 7: mod_base = OTHER; note = 2'-O-methyladenosine-3'-phosphate
  modified_base 8: mod_base = OTHER; note = 2'-O-methylcytidine-3'-phosphate
  modified_base 9: mod_base = OTHER; note = 2'-O-methyladenosine-3'-phosphate
  modified_base 10: mod_base = OTHER; note = 2'-O-methylguanosine-3'-phosphate
  modified_base 11: mod_base = OTHER; note = 2'-O-methyluridine-3'-phosphate
  modified_base 12: mod_base = OTHER; note = 2'-O-methyladenosine-3'-phosphate
  modified_base 13: mod_base = OTHER; note = 2'-O-methyladenosine-3'-phosphate
  modified_base 14: mod_base = OTHER; note = 2'-deoxy-2'-fluorouridine-3'-phosphate
  modified_base 15: mod_base = OTHER; note = 2'-O-methyluridine-3'-phosphate
  modified_base 16: mod_base = OTHER; note = 2'-deoxy-2'-fluorocytidine-3'-phosphate
  modified_base 17: mod_base = OTHER; note = 2'-O-methyluridine-3'-phosphate
  modified_base 18: mod_base = OTHER; note = 2'-O-methyluridine-3'-phosphate
  modified_base 19: mod_base = OTHER; note = 2'-O-methylcytidine-3'-phosphate
  modified_base 20: mod_base = OTHER; note = 2'-O-methyluridine-3'-phosphate
  modified_base 21: mod_base = OTHER; note = 2'-O-methyluridine-3'-phosphate
  modified_base 22: mod_base = OTHER; note = 2'-O-methylcytidine-3'-phosphate
  modified_base 23: mod_base = OTHER; note = 2'-O-methyladenosine
tttacgacagtaattcttcttca

SEQ ID NO: 4793 - RNA, 23 nt, synthetic construct
  source 1..23: mol_type = other RNA
  modified_base 1: mod_base = OTHER; note = 2'-O-methyluridine-3'-phosphate 5'phosphate
  modified_base 2: mod_base = OTHER; note = 2'-deoxy-2'-fluorocytidine-3'-phosphate
  modified_base 3: mod_base = OTHER; note = 2'-O-methyladenosine-3'-phosphate
  modified_base 4: mod_base = OTHER; note = 2'-O-methylcytidine-3'-phosphate
  modified_base 5: mod_base = OTHER; note = 2'-O-methylcytidine-3'-phosphate
  modified_base 6: mod_base = OTHER; note = 2'-deoxy-2'-fluoroadenosine-3'-phosphate
  modified_base 7: mod_base = OTHER; note = 2'-O-methyladenosine-3'-phosphate
  modified_base 8: mod_base = OTHER; note = 2'-O-methylguanosine-3'-phosphate
  modified_base 9: mod_base = OTHER; note = 2'-O-methylguanosine-3'-phosphate
  modified_base 10: mod_base = OTHER; note = 2'-O-methylcytidine-3'-phosphate
  modified_base 11: mod_base = OTHER; note = 2'-O-methylcytidine-3'-phosphate
  modified_base 12: mod_base = OTHER; note = 2'-O-methylguanosine-3'-phosphate
  modified_base 13: mod_base = OTHER; note = 2'-O-methylcytidine-3'-phosphate
  modified_base 14: mod_base = OTHER; note = 2'-deoxy-2'-fluoroadenosine-3'-phosphate
  modified_base 15: mod_base = OTHER; note = 2'-O-methylguanosine-3'-phosphate
  modified_base 16: mod_base = OTHER; note = 2'-deoxy-2'-fluorocytidine-3'-phosphate
  modified_base 17: mod_base = OTHER; note = 2'-O-methyluridine-3'-phosphate
  modified_base 18: mod_base = OTHER; note = 2'-O-methylcytidine-3'-phosphate
  modified_base 19: mod_base = OTHER; note = 2'-O-methylcytidine-3'-phosphate
  modified_base 20: mod_base = OTHER; note = 2'-O-methylcytidine-3'-phosphate
  modified_base 21: mod_base = OTHER; note = 2'-O-methyluridine-3'-phosphate
  modified_base 22: mod_base = OTHER; note = 2'-O-methyladenosine-3'-phosphate
  modified_base 23: mod_base = OTHER; note = 2'-O-methyluridine
tcaccaaggccgcagctccctat

SEQ ID NO: 4794 - RNA, 23 nt, synthetic construct
  source 1..23: mol_type = other RNA
  modified_base 1: mod_base = OTHER; note = 2'-O-methyluridine-3'-phosphate 5'phosphate
  modified_base 2: mod_base = OTHER; note = 2'-deoxy-2'-fluoroadenosine-3'-phosphate
  modified_base 3: mod_base = OTHER; note = 2'-O-methyladenosine-3'-phosphate
  modified_base 4: mod_base = OTHER; note = 2'-O-methylcytidine-3'-phosphate
  modified_base 5: mod_base = OTHER; note = 2'-O-methyladenosine-3'-phosphate
  modified_base 6: mod_base = OTHER; note = 2'-deoxy-2'-fluorocytidine-3'-phosphate
  modified_base 7: mod_base = OTHER; note = 2'-O-methylcytidine-3'-phosphate
  modified_base 8: mod_base = OTHER; note = 2'-O-methyladenosine-3'-phosphate
  modified_base 9: mod_base = OTHER; note = 2'-O-methyladenosine-3'-phosphate
  modified_base 10: mod_base = OTHER; note = 2'-O-methylguanosine-3'-phosphate
  modified_base 11: mod_base = OTHER; note = 2'-O-methylguanosine-3'-phosphate
  modified_base 12: mod_base = OTHER; note = 2'-O-methylcytidine-3'-phosphate
  modified_base 13: mod_base = OTHER; note = 2'-O-methylcytidine-3'-phosphate
  modified_base 14: mod_base = OTHER; note = 2'-deoxy-2'-fluoroguanosine-3'-phosphate
  modified_base 15: mod_base = OTHER; note = 2'-O-methylcytidine-3'-phosphate
  modified_base 16: mod_base = OTHER; note = 2'-deoxy-2'-fluoroadenosine-3'-phosphate
  modified_base 17: mod_base = OTHER; note = 2'-O-methylguanosine-3'-phosphate
  modified_base 18: mod_base = OTHER; note = 2'-O-methylcytidine-3'-phosphate
  modified_base 19: mod_base = OTHER; note = 2'-O-methyluridine-3'-phosphate
  modified_base 20: mod_base = OTHER; note = 2'-O-methylcytidine-3'-phosphate
  modified_base 21: mod_base = OTHER; note = 2'-O-methylcytidine-3'-phosphate
  modified_base 22: mod_base = OTHER; note = 2'-O-methylcytidine-3'-phosphate
  modified_base 23: mod_base = OTHER; note = 2'-O-methyluridine
taacaccaaggccgcagctccct

SEQ ID NO: 4795 - RNA, 23 nt, synthetic construct
  source 1..23: mol_type = other RNA
  modified_base 1: mod_base = OTHER; note = 2'-O-methyluridine-3'-phosphate 5'phosphate
  modified_base 2: mod_base = OTHER; note = 2'-deoxy-2'-fluoroadenosine-3'-phosphate
  modified_base 3: mod_base = OTHER; note = 2'-O-methyladenosine-3'-phosphate
  modified_base 4: mod_base = OTHER; note = 2'-O-methyladenosine-3'-phosphate
  modified_base 5: mod_base = OTHER; note = 2'-O-methylcytidine-3'-phosphate
  modified_base 6: mod_base = OTHER; note = 2'-deoxy-2'-fluoroadenosine-3'-phosphate
  modified_base 7: mod_base = OTHER; note = 2'-O-methylcytidine-3'-phosphate
  modified_base 8: mod_base = OTHER; note = 2'-O-methylcytidine-3'-phosphate
  modified_base 9: mod_base = OTHER; note = 2'-O-methyladenosine-3'-phosphate
  modified_base 10: mod_base = OTHER; note = 2'-O-methyladenosine-3'-phosphate
  modified_base 11: mod_base = OTHER; note = 2'-O-methylguanosine-3'-phosphate
  modified_base 12: mod_base = OTHER; note = 2'-O-methylguanosine-3'-phosphate
  modified_base 13: mod_base = OTHER; note = 2'-O-methylcytidine-3'-phosphate
  modified_base 14: mod_base = OTHER; note = 2'-deoxy-2'-fluorocytidine-3'-phosphate
  modified_base 15: mod_base = OTHER; note = 2'-O-methylguanosine-3'-phosphate
  modified_base 16: mod_base = OTHER; note = 2'-deoxy-2'-fluorocytidine-3'-phosphate
  modified_base 17: mod_base = OTHER; note = 2'-O-methyladenosine-3'-phosphate
  modified_base 18: mod_base = OTHER; note = 2'-O-methylguanosine-3'-phosphate
  modified_base 19: mod_base = OTHER; note = 2'-O-methylcytidine-3'-phosphate
  modified_base 20: mod_base = OTHER; note = 2'-O-methyluridine-3'-phosphate
  modified_base 21: mod_base = OTHER; note = 2'-O-methylcytidine-3'-phosphate
  modified_base 22: mod_base = OTHER; note = 2'-O-methylcytidine-3'-phosphate
  modified_base 23: mod_base = OTHER; note = 2'-O-methylcytidine
taaacaccaaggccgcagctccc

SEQ ID NO: 4796 - RNA, 23 nt, synthetic construct
  source 1..23: mol_type = other RNA
  modified_base 1: mod_base = OTHER; note = 2'-O-methyluridine-3'-phosphate 5'phosphate
  modified_base 2: mod_base = OTHER; note = 2'-deoxy-2'-fluoroguanosine-3'-phosphate
  modified_base 3: mod_base = OTHER; note = 2'-O-methyladenosine-3'-phosphate
  modified_base 4: mod_base = OTHER; note = 2'-O-methyladenosine-3'-phosphate
  modified_base 5: mod_base = OTHER; note = 2'-O-methyladenosine-3'-phosphate
  modified_base 6: mod_base = OTHER; note = 2'-deoxy-2'-fluorocytidine-3'-phosphate
  modified_base 7: mod_base = OTHER; note = 2'-O-methyladenosine-3'-phosphate
  modified_base 8: mod_base = OTHER; note = 2'-O-methylcytidine-3'-phosphate
  modified_base 9: mod_base = OTHER; note = 2'-O-methylcytidine-3'-phosphate
  modified_base 10: mod_base = OTHER; note = 2'-O-methyladenosine-3'-phosphate
  modified_base 11: mod_base = OTHER; note = 2'-O-methyladenosine-3'-phosphate
  modified_base 12: mod_base = OTHER; note = 2'-O-methylguanosine-3'-phosphate
  modified_base 13: mod_base = OTHER; note = 2'-O-methylguanosine-3'-phosphate
  modified_base 14: mod_base = OTHER; note = 2'-deoxy-2'-fluorocytidine-3'-phosphate
  modified_base 15: mod_base = OTHER; note = 2'-O-methylcytidine-3'-phosphate
  modified_base 16: mod_base = OTHER; note = 2'-deoxy-2'-fluoroguanosine-3'-phosphate
  modified_base 17: mod_base = OTHER; note = 2'-O-methylcytidine-3'-phosphate
  modified_base 18: mod_base = OTHER; note = 2'-O-methyladenosine-3'-phosphate
  modified_base 19: mod_base = OTHER; note = 2'-O-methylguanosine-3'-phosphate
  modified_base 20: mod_base = OTHER; note = 2'-O-methylcytidine-3'-phosphate
  modified_base 21: mod_base = OTHER; note = 2'-O-methyluridine-3'-phosphate
  modified_base 22: mod_base = OTHER; note = 2'-O-methylcytidine-3'-phosphate
  modified_base 23: mod_base = OTHER; note = 2'-O-methylcytidine
tgaaacaccaaggccgcagctcc

SEQ ID NO: 4797 - RNA, 23 nt, synthetic construct
  source 1..23: mol_type = other RNA
  modified_base 1: mod_base = OTHER; note = 2'-O-methyluridine-3'-phosphate 5'phosphate
  modified_base 2: mod_base = OTHER; note = 2'-deoxy-2'-fluoroguanosine-3'-phosphate
  modified_base 3: mod_base = OTHER; note = 2'-O-methylguanosine-3'-phosphate
  modified_base 4: mod_base = OTHER; note = 2'-O-methyluridine-3'-phosphate
  modified_base 5: mod_base = OTHER; note = 2'-O-methylguanosine-3'-phosphate
  modified_base 6: mod_base = OTHER; note = 2'-deoxy-2'-fluoroadenosine-3'-phosphate
  modified_base 7: mod_base = OTHER; note = 2'-O-methyladenosine-3'-phosphate
  modified_base 8: mod_base = OTHER; note = 2'-O-methyladenosine-3'-phosphate
  modified_base 9: mod_base = OTHER; note = 2'-O-methylcytidine-3'-phosphate
  modified_base 10: mod_base = OTHER; note = 2'-O-methyladenosine-3'-phosphate
  modified_base 11: mod_base = OTHER; note = 2'-O-methylcytidine-3'-phosphate
  modified_base 12: mod_base = OTHER; note = 2'-O-methylcytidine-3'-phosphate
  modified_base 13: mod_base = OTHER; note = 2'-O-methyladenosine-3'-phosphate
  modified_base 14: mod_base = OTHER; note = 2'-deoxy-2'-fluoroadenosine-3'-phosphate
  modified_base 15: mod_base = OTHER; note = 2'-O-methylguanosine-3'-phosphate
  modified_base 16: mod_base = OTHER; note = 2'-deoxy-2'-fluoroguanosine-3'-phosphate
  modified_base 17: mod_base = OTHER; note = 2'-O-methylcytidine-3'-phosphate
  modified_base 18: mod_base = OTHER; note = 2'-O-methylcytidine-3'-phosphate
  modified_base 19: mod_base = OTHER; note = 2'-O-methylguanosine-3'-phosphate
  modified_base 20: mod_base = OTHER; note = 2'-O-methylcytidine-3'-phosphate
  modified_base 21: mod_base = OTHER; note = 2'-O-methyladenosine-3'-phosphate
  modified_base 22: mod_base = OTHER; note = 2'-O-methylguanosine-3'-phosphate
  modified_base 23: mod_base = OTHER; note = 2'-O-methylcytidine
tggtgaaacaccaaggccgcagc

SEQ ID NO: 4798 - RNA, 23 nt, synthetic construct
  source 1..23: mol_type = other RNA
  modified_base 1: mod_base = OTHER; note = 2'-O-methyluridine-3'-phosphate 5'phosphate
  modified_base 2: mod_base = OTHER; note = 2'-deoxy-2'-fluoroguanosine-3'-phosphate
  modified_base 3: mod_base = OTHER; note = 2'-O-methyluridine-3'-phosphate
  modified_base 4: mod_base = OTHER; note = 2'-O-methylguanosine-3'-phosphate
  modified_base 5: mod_base = OTHER; note = 2'-O-methylguanosine-3'-phosphate
  modified_base 6: mod_base = OTHER; note = 2'-deoxy-2'-fluorouridine-3'-phosphate
  modified_base 7: mod_base = OTHER; note = 2'-O-methylguanosine-3'-phosphate
  modified_base 8: mod_base = OTHER; note = 2'-O-methyladenosine-3'-phosphate
  modified_base 9: mod_base = OTHER; note = 2'-O-methyladenosine-3'-phosphate
  modified_base 10: mod_base = OTHER; note = 2'-O-methyladenosine-3'-phosphate
  modified_base 11: mod_base = OTHER; note = 2'-O-methylcytidine-3'-phosphate
  modified_base 12: mod_base = OTHER; note = 2'-O-methyladenosine-3'-phosphate
  modified_base 13: mod_base = OTHER; note = 2'-O-methylcytidine-3'-phosphate
  modified_base 14: mod_base = OTHER; note = 2'-deoxy-2'-fluorocytidine-3'-phosphate
  modified_base 15: mod_base = OTHER; note = 2'-O-methyladenosine-3'-phosphate
  modified_base 16: mod_base = OTHER; note = 2'-deoxy-2'-fluoroadenosine-3'-phosphate
  modified_base 17: mod_base = OTHER; note = 2'-O-methylguanosine-3'-phosphate
  modified_base 18: mod_base = OTHER; note = 2'-O-methylguanosine-3'-phosphate
  modified_base 19: mod_base = OTHER; note = 2'-O-methylcytidine-3'-phosphate
  modified_base 20: mod_base = OTHER; note = 2'-O-methylcytidine-3'-phosphate
  modified_base 21: mod_base = OTHER; note = 2'-O-methylguanosine-3'-phosphate
  modified_base 22: mod_base = OTHER; note = 2'-O-methylcytidine-3'-phosphate
  modified_base 23: mod_base = OTHER; note = 2'-O-methyladenosine
tgtggtgaaacaccaaggccgca

SEQ ID NO: 4799 - RNA, 23 nt, synthetic construct
  source 1..23: mol_type = other RNA
  modified_base 1: mod_base = OTHER; note = 2'-O-methyluridine-3'-phosphate 5'phosphate
  modified_base 2: mod_base = OTHER; note = 2'-deoxy-2'-fluoroguanosine-3'-phosphate
  modified_base 3: mod_base = OTHER; note = 2'-O-methylguanosine-3'-phosphate
  modified_base 4: mod_base = OTHER; note = 2'-O-methyluridine-3'-phosphate
  modified_base 5: mod_base = OTHER; note = 2'-O-methylguanosine-3'-phosphate
  modified_base 6: mod_base = OTHER; note = 2'-deoxy-2'-fluoroguanosine-3'-phosphate
  modified_base 7: mod_base = OTHER; note = 2'-O-methyluridine-3'-phosphate
  modified_base 8: mod_base = OTHER; note = 2'-O-methylguanosine-3'-phosphate
  modified_base 9: mod_base = OTHER; note = 2'-O-methyladenosine-3'-phosphate
  modified_base 10: mod_base = OTHER; note = 2'-O-methyladenosine-3'-phosphate
  modified_base 11: mod_base = OTHER; note = 2'-O-methyladenosine-3'-phosphate
  modified_base 12: mod_base = OTHER; note = 2'-O-methylcytidine-3'-phosphate
  modified_base 13: mod_base = OTHER; note = 2'-O-methyladenosine-3'-phosphate
  modified_base 14: mod_base = OTHER; note = 2'-deoxy-2'-fluorocytidine-3'-phosphate
  modified_base 15: mod_base = OTHER; note = 2'-O-methylcytidine-3'-phosphate
  modified_base 16: mod_base = OTHER; note = 2'-deoxy-2'-fluoroadenosine-3'-phosphate
  modified_base 17: mod_base = OTHER; note = 2'-O-methyladenosine-3'-phosphate
  modified_base 18: mod_base = OTHER; note = 2'-O-methylguanosine-3'-phosphate
  modified_base 19: mod_base = OTHER; note = 2'-O-methylguanosine-3'-phosphate
  modified_base 20: mod_base = OTHER; note = 2'-O-methylcytidine-3'-phosphate
  modified_base 21: mod_base = OTHER; note = 2'-O-methylcytidine-3'-phosphate
  modified_base 22: mod_base = OTHER; note = 2'-O-methylguanosine-3'-phosphate
  modified_base 23: mod_base = OTHER; note = 2'-O-methylcytidine
tggtggtgaaacaccaaggccgc

SEQ ID NO: 4800 - RNA, 23 nt, synthetic construct
  source 1..23: mol_type = other RNA
  modified_base 1: mod_base = OTHER; note = 2'-O-methyluridine-3'-phosphate 5'phosphate
  modified_base 2: mod_base = OTHER; note = 2'-deoxy-2'-fluorocytidine-3'-phosphate
  modified_base 3: mod_base = OTHER; note = 2'-O-methylguanosine-3'-phosphate
  modified_base 4: mod_base = OTHER; note = 2'-O-methylguanosine-3'-phosphate
  modified_base 5: mod_base = OTHER; note = 2'-O-methyluridine-3'-phosphate
  modified_base 6: mod_base = OTHER; note = 2'-deoxy-2'-fluoroguanosine-3'-phosphate
  modified_base 7: mod_base = OTHER; note = 2'-O-methylguanosine-3'-phosphate
  modified_base 8: mod_base = OTHER; note = 2'-O-methyluridine-3'-phosphate
  modified_base 9: mod_base = OTHER; note = 2'-O-methylguanosine-3'-phosphate
  modified_base 10: mod_base = OTHER; note = 2'-O-methyladenosine-3'-phosphate
  modified_base 11: mod_base = OTHER; note = 2'-O-methyladenosine-3'-phosphate
  modified_base 12: mod_base = OTHER; note = 2'-O-methyladenosine-3'-phosphate
  modified_base 13: mod_base = OTHER; note = 2'-O-methylcytidine-3'-phosphate
  modified_base 14: mod_base = OTHER; note = 2'-deoxy-2'-fluoroadenosine-3'-phosphate
  modified_base 15: mod_base = OTHER; note = 2'-O-methylcytidine-3'-phosphate
  modified_base 16: mod_base = OTHER; note = 2'-deoxy-2'-fluorocytidine-3'-phosphate
  modified_base 17: mod_base = OTHER; note = 2'-O-methyladenosine-3'-phosphate
  modified_base 18: mod_base = OTHER; note = 2'-O-methyladenosine-3'-phosphate
  modified_base 19: mod_base = OTHER; note = 2'-O-methylguanosine-3'-phosphate
  modified_base 20: mod_base = OTHER; note = 2'-O-methylguanosine-3'-phosphate
  modified_base 21: mod_base = OTHER; note = 2'-O-methylcytidine-3'-phosphate
  modified_base 22: mod_base = OTHER; note = 2'-O-methylcytidine-3'-phosphate
  modified_base 23: mod_base = OTHER; note = 2'-O-methylguanosine
tcggtggtgaaacaccaaggccg

SEQ ID NO: 4801 - RNA, 23 nt, synthetic construct
  source 1..23: mol_type = other RNA
  modified_base 1: mod_base = OTHER; note = 2'-O-methyluridine-3'-phosphate 5'phosphate
  modified_base 2: mod_base = OTHER; note = 2'-deoxy-2'-fluoroadenosine-3'-phosphate
  modified_base 3: mod_base = OTHER; note = 2'-O-methyladenosine-3'-phosphate
  modified_base 4: mod_base = OTHER; note = 2'-O-methyladenosine-3'-phosphate
  modified_base 5: mod_base = OTHER; note = 2'-O-methylguanosine-3'-phosphate
  modified_base 6: mod_base = OTHER; note = 2'-deoxy-2'-fluorouridine-3'-phosphate
  modified_base 7: mod_base = OTHER; note = 2'-O-methyluridine-3'-phosphate
  modified_base 8: mod_base = OTHER; note = 2'-O-methylcytidine-3'-phosphate
  modified_base 9: mod_base = OTHER; note = 2'-O-methylcytidine-3'-phosphate
  modified_base 10: mod_base = OTHER; note = 2'-O-methylcytidine-3'-phosphate
  modified_base 11: mod_base = OTHER; note = 2'-O-methyladenosine-3'-phosphate
  modified_base 12: mod_base = OTHER; note = 2'-O-methylguanosine-3'-phosphate
  modified_base 13: mod_base = OTHER; note = 2'-O-methylcytidine-3'-phosphate
  modified_base 14: mod_base = OTHER; note = 2'-deoxy-2'-fluoroguanosine-3'-phosphate
  modified_base 15: mod_base = OTHER; note = 2'-O-methylcytidine-3'-phosphate
  modified_base 16: mod_base = OTHER; note = 2'-deoxy-2'-fluorouridine-3'-phosphate
  modified_base 17: mod_base = OTHER; note = 2'-O-methyluridine-3'-phosphate
  modified_base 18: mod_base = OTHER; note = 2'-O-methylguanosine-3'-phosphate
  modified_base 19: mod_base = OTHER; note = 2'-O-methyluridine-3'-phosphate
  modified_base 20: mod_base = OTHER; note = 2'-O-methyluridine-3'-phosphate
  modified_base 21: mod_base = OTHER; note = 2'-O-methylguanosine-3'-phosphate
  modified_base 22: mod_base = OTHER; note = 2'-O-methylguanosine-3'-phosphate
  modified_base 23: mod_base = OTHER; note = 2'-O-methylguanosine
taaagttcccagcgcttgttggg

SEQ ID NO: 4802 - RNA, 23 nt, synthetic construct
  source 1..23: mol_type = other RNA
  modified_base 1: mod_base = OTHER; note = 2'-O-methyluridine-3'-phosphate 5'phosphate
  modified_base 2: mod_base = OTHER; note = 2'-deoxy-2'-fluorocytidine-3'-phosphate
  modified_base 3: mod_base = OTHER; note = 2'-O-methyladenosine-3'-phosphate
  modified_base 4: mod_base = OTHER; note = 2'-O-methyladenosine-3'-phosphate
  modified_base 5: mod_base = OTHER; note = 2'-O-methyladenosine-3'-phosphate
  modified_base 6: mod_base = OTHER; note = 2'-deoxy-2'-fluoroguanosine-3'-phosphate
  modified_base 7: mod_base = OTHER; note = 2'-O-methyluridine-3'-phosphate
  modified_base 8: mod_base = OTHER; note = 2'-O-methyluridine-3'-phosphate
  modified_base 9: mod_base = OTHER; note = 2'-O-methylcytidine-3'-phosphate
  modified_base 10: mod_base = OTHER; note = 2'-O-methylcytidine-3'-phosphate
  modified_base 11: mod_base = OTHER; note = 2'-O-methylcytidine-3'-phosphate
  modified_base 12: mod_base = OTHER; note = 2'-O-methyladenosine-3'-phosphate
  modified_base 13: mod_base = OTHER; note = 2'-O-methylguanosine-3'-phosphate
  modified_base 14: mod_base = OTHER; note = 2'-deoxy-2'-fluorocytidine-3'-phosphate
  modified_base 15: mod_base = OTHER; note = 2'-O-methylguanosine-3'-phosphate
  modified_base 16: mod_base = OTHER; note = 2'-deoxy-2'-fluorocytidine-3'-phosphate
  modified_base 17: mod_base = OTHER; note = 2'-O-methyluridine-3'-phosphate
  modified_base 18: mod_base = OTHER; note = 2'-O-methyluridine-3'-phosphate
  modified_base 19: mod_base = OTHER; note = 2'-O-methylguanosine-3'-phosphate
  modified_base 20: mod_base = OTHER; note = 2'-O-methyluridine-3'-phosphate
  modified_base 21: mod_base = OTHER; note = 2'-O-methyluridine-3'-phosphate
  modified_base 22: mod_base = OTHER; note = 2'-O-methylguanosine-3'-phosphate
  modified_base 23: mod_base = OTHER; note = 2'-O-methylguanosine
tcaaagttcccagcgcttgttgg

SEQ ID NO: 4803 - RNA, 23 nt, synthetic construct
  source 1..23: mol_type = other RNA
  modified_base 1: mod_base = OTHER; note = 2'-O-methyluridine-3'-phosphate 5'phosphate
  modified_base 2: mod_base = OTHER; note = 2'-deoxy-2'-fluorouridine-3'-phosphate
  modified_base 3: mod_base = OTHER; note = 2'-O-methylguanosine-3'-phosphate
  modified_base 4: mod_base = OTHER; note = 2'-O-methylguanosine-3'-phosphate
  modified_base 5: mod_base = OTHER; note = 2'-O-methyluridine-3'-phosphate
  modified_base 6: mod_base = OTHER; note = 2'-deoxy-2'-fluoroguanosine-3'-phosphate
  modified_base 7: mod_base = OTHER; note = 2'-O-methylguanosine-3'-phosphate
  modified_base 8: mod_base = OTHER; note = 2'-O-methyladenosine-3'-phosphate
  modified_base 9: mod_base = OTHER; note = 2'-O-methylguanosine-3'-phosphate
  modified_base 10: mod_base = OTHER; note = 2'-O-methylguanosine-3'-phosphate
  modified_base 11: mod_base = OTHER; note = 2'-O-methyluridine-3'-phosphate
  modified_base 12: mod_base = OTHER; note = 2'-O-methylguanosine-3'-phosphate
  modified_base 13: mod_base = OTHER; note = 2'-O-methyluridine-3'-phosphate
  modified_base 14: mod_base = OTHER; note = 2'-deoxy-2'-fluorouridine-3'-phosphate
  modified_base 15: mod_base = OTHER; note = 2'-O-methylguanosine-3'-phosphate
  modified_base 16: mod_base = OTHER; note = 2'-deoxy-2'-fluorouridine-3'-phosphate
  modified_base 17: mod_base = OTHER; note = 2'-O-methylguanosine-3'-phosphate
  modified_base 18: mod_base = OTHER; note = 2'-O-methylcytidine-3'-phosphate
  modified_base 19: mod_base = OTHER; note = 2'-O-methyladenosine-3'-phosphate
  modified_base 20: mod_base = OTHER; note = 2'-O-methylguanosine-3'-phosphate
  modified_base 21: mod_base = OTHER; note = 2'-O-methylcytidine-3'-phosphate
  modified_base 22: mod_base = OTHER; note = 2'-O-methylguanosine-3'-phosphate
  modified_base 23: mod_base = OTHER; note = 2'-O-methylguanosine
ttggtggaggtgttgtgcagcgg

SEQ ID NO: 4804 - RNA, 23 nt, synthetic construct
  source 1..23: mol_type = other RNA
  modified_base 1: mod_base = OTHER; note = 2'-O-methyluridine-3'-phosphate 5'phosphate
  modified_base 2: mod_base = OTHER; note = 2'-deoxy-2'-fluoroadenosine-3'-phosphate
  modified_base 3: mod_base = OTHER; note = 2'-O-methyluridine-3'-phosphate
  modified_base 4: mod_base = OTHER; note = 2'-O-methylguanosine-3'-phosphate
  modified_base 5: mod_base = OTHER; note = 2'-O-methylguanosine-3'-phosphate
  modified_base 6: mod_base = OTHER; note = 2'-deoxy-2'-fluorouridine-3'-phosphate
  modified_base 7: mod_base = OTHER; note = 2'-O-methylguanosine-3'-phosphate
  modified_base 8: mod_base = OTHER; note = 2'-O-methylguanosine-3'-phosphate
  modified_base 9: mod_base = OTHER; note = 2'-O-methyladenosine-3'-phosphate
  modified_base 10: mod_base = OTHER; note = 2'-O-methylguanosine-3'-phosphate
  modified_base 11: mod_base = OTHER; note = 2'-O-methylguanosine-3'-phosphate
  modified_base 12: mod_base = OTHER; note = 2'-O-methyluridine-3'-phosphate
  modified_base 13: mod_base = OTHER; note = 2'-O-methylguanosine-3'-phosphate
  modified_base 14: mod_base = OTHER; note = 2'-deoxy-2'-fluorouridine-3'-phosphate
  modified_base 15: mod_base = OTHER; note = 2'-O-methyluridine-3'-phosphate
  modified_base 16: mod_base = OTHER; note = 2'-deoxy-2'-fluoroguanosine-3'-phosphate
  modified_base 17: mod_base = OTHER; note = 2'-O-methyluridine-3'-phosphate
  modified_base 18: mod_base = OTHER; note = 2'-O-methylguanosine-3'-phosphate
  modified_base 19: mod_base = OTHER; note = 2'-O-methylcytidine-3'-phosphate
  modified_base 20: mod_base = OTHER; note = 2'-O-methyladenosine-3'-phosphate
  modified_base 21: mod_base = OTHER; note = 2'-O-methylguanosine-3'-phosphate
  modified_base 22: mod_base = OTHER; note = 2'-O-methylcytidine-3'-phosphate
  modified_base 23: mod_base = OTHER; note = 2'-O-methylguanosine
tatggtggaggtgttgtgcagcg

SEQ ID NO: 4805 - RNA, 23 nt, synthetic construct
  source 1..23: mol_type = other RNA
  modified_base 1: mod_base = OTHER; note = 2'-O-methyluridine-3'-phosphate 5'phosphate
  modified_base 2: mod_base = OTHER; note = 2'-deoxy-2'-fluoroguanosine-3'-phosphate
  modified_base 3: mod_base = OTHER; note = 2'-O-methyladenosine-3'-phosphate
  modified_base 4: mod_base = OTHER; note = 2'-O-methyluridine-3'-phosphate
  modified_base 5: mod_base = OTHER; note = 2'-O-methylguanosine-3'-phosphate
  modified_base 6: mod_base = OTHER; note = 2'-deoxy-2'-fluoroguanosine-3'-phosphate
  modified_base 7: mod_base = OTHER; note = 2'-O-methyluridine-3'-phosphate
  modified_base 8: mod_base = OTHER; note = 2'-O-methylguanosine-3'-phosphate
  modified_base 9: mod_base = OTHER; note = 2'-O-methylguanosine-3'-phosphate
  modified_base 10: mod_base = OTHER; note = 2'-O-methyladenosine-3'-phosphate
  modified_base 11: mod_base = OTHER; note = 2'-O-methylguanosine-3'-phosphate
  modified_base 12: mod_base = OTHER; note = 2'-O-methylguanosine-3'-phosphate
  modified_base 13: mod_base = OTHER; note = 2'-O-methyluridine-3'-phosphate
  modified_base 14: mod_base = OTHER; note = 2'-deoxy-2'-fluoroguanosine-3'-phosphate
  modified_base 15: mod_base = OTHER; note = 2'-O-methyluridine-3'-phosphate
  modified_base 16: mod_base = OTHER; note = 2'-deoxy-2'-fluorouridine-3'-phosphate
  modified_base 17: mod_base = OTHER; note = 2'-O-methylguanosine-3'-phosphate
  modified_base 18: mod_base = OTHER; note = 2'-O-methyluridine-3'-phosphate
  modified_base 19: mod_base = OTHER; note = 2'-O-methylguanosine-3'-phosphate
  modified_base 20: mod_base = OTHER; note = 2'-O-methylcytidine-3'-phosphate
  modified_base 21: mod_base = OTHER; note = 2'-O-methyladenosine-3'-phosphate
  modified_base 22: mod_base = OTHER; note = 2'-O-methylguanosine-3'-phosphate
  modified_base 23: mod_base = OTHER; note = 2'-O-methylcytidine
tgatggtggaggtgttgtgcagc

SEQ ID NO: 4806 - RNA, 23 nt, synthetic construct
  source 1..23: mol_type = other RNA
  modified_base 1: mod_base = OTHER; note = 2'-O-methyluridine-3'-phosphate 5'phosphate
  modified_base 2: mod_base = OTHER; note = 2'-deoxy-2'-fluoroadenosine-3'-phosphate
  modified_base 3: mod_base = OTHER; note = 2'-O-methylguanosine-3'-phosphate
  modified_base 4: mod_base = OTHER; note = 2'-O-methyladenosine-3'-phosphate
  modified_base 5: mod_base = OTHER; note = 2'-O-methyluridine-3'-phosphate
  modified_base 6: mod_base = OTHER; note = 2'-deoxy-2'-fluoroguanosine-3'-phosphate
  modified_base 7: mod_base = OTHER; note = 2'-O-methylguanosine-3'-phosphate
  modified_base 8: mod_base = OTHER; note = 2'-O-methyluridine-3'-phosphate
  modified_base 9: mod_base = OTHER; note = 2'-O-methylguanosine-3'-phosphate
  modified_base 10: mod_base = OTHER; note = 2'-O-methylguanosine-3'-phosphate
  modified_base 11: mod_base = OTHER; note = 2'-O-methyladenosine-3'-phosphate
  modified_base 12: mod_base = OTHER; note = 2'-O-methylguanosine-3'-phosphate
  modified_base 13: mod_base = OTHER; note = 2'-O-methylguanosine-3'-phosphate
  modified_base 14: mod_base = OTHER; note = 2'-deoxy-2'-fluorouridine-3'-phosphate
  modified_base 15: mod_base = OTHER; note = 2'-O-methylguanosine-3'-phosphate
  modified_base 16: mod_base = OTHER; note = 2'-deoxy-2'-fluorouridine-3'-phosphate
  modified_base 17: mod_base = OTHER; note = 2'-O-methyluridine-3'-phosphate
  modified_base 18: mod_base = OTHER; note = 2'-O-methylguanosine-3'-phosphate
  modified_base 19: mod_base = OTHER; note = 2'-O-methyluridine-3'-phosphate
  modified_base 20: mod_base = OTHER; note = 2'-O-methylguanosine-3'-phosphate
  modified_base 21: mod_base = OTHER; note = 2'-O-methylcytidine-3'-phosphate
  modified_base 22: mod_base = OTHER; note = 2'-O-methyladenosine-3'-phosphate
  modified_base 23: mod_base = OTHER; note = 2'-O-methylguanosine
tagatggtggaggtgttgtgcag

SEQ ID NO: 4807 - RNA, 23 nt, synthetic construct
  source 1..23: mol_type = other RNA
  modified_base 1: mod_base = OTHER; note = 2'-O-methyluridine-3'-phosphate 5'phosphate
  modified_base 2: mod_base = OTHER; note = 2'-deoxy-2'-fluoroadenosine-3'-phosphate
  modified_base 3: mod_base = OTHER; note = 2'-O-methyladenosine-3'-phosphate
  modified_base 4: mod_base = OTHER; note = 2'-O-methylguanosine-3'-phosphate
  modified_base 5: mod_base = OTHER; note = 2'-O-methyladenosine-3'-phosphate
  modified_base 6: mod_base = OTHER; note = 2'-deoxy-2'-fluorouridine-3'-phosphate
  modified_base 7: mod_base = OTHER; note = 2'-O-methylguanosine-3'-phosphate
  modified_base 8: mod_base = OTHER; note = 2'-O-methylguanosine-3'-phosphate
  modified_base 9: mod_base = OTHER; note = 2'-O-methyluridine-3'-phosphate
  modified_base 10: mod_base = OTHER; note = 2'-O-methylguanosine-3'-phosphate
  modified_base 11: mod_base = OTHER; note = 2'-O-methylguanosine-3'-phosphate
  modified_base 12: mod_base = OTHER; note = 2'-O-methyladenosine-3'-phosphate
  modified_base 13: mod_base = OTHER; note = 2'-O-methylguanosine-3'-phosphate
  modified_base 14: mod_base = OTHER; note = 2'-deoxy-2'-fluoroguanosine-3'-phosphate
  modified_base 15: mod_base = OTHER; note = 2'-O-methyluridine-3'-phosphate
  modified_base 16: mod_base = OTHER; note = 2'-deoxy-2'-fluoroguanosine-3'-phosphate
  modified_base 17: mod_base = OTHER; note = 2'-O-methyluridine-3'-phosphate
  modified_base 18: mod_base = OTHER; note = 2'-O-methyluridine-3'-phosphate
  modified_base 19: mod_base = OTHER; note = 2'-O-methylguanosine-3'-phosphate
  modified_base 20: mod_base = OTHER; note = 2'-O-methyluridine-3'-phosphate
  modified_base 21: mod_base = OTHER; note = 2'-O-methylguanosine-3'-phosphate
  modified_base 22: mod_base = OTHER; note = 2'-O-methylcytidine-3'-phosphate
  modified_base 23: mod_base = OTHER; note = 2'-O-methyladenosine
taagatggtggaggtgttgtgca

SEQ ID NO: 4808 - RNA, 23 nt, synthetic construct
  source 1..23: mol_type = other RNA
  modified_base 1: mod_base = OTHER; note = 2'-O-methyluridine-3'-phosphate 5'phosphate
  modified_base 2: mod_base = OTHER; note = 2'-deoxy-2'-fluoroguanosine-3'-phosphate
  modified_base 3: mod_base = OTHER; note = 2'-O-methyladenosine-3'-phosphate
  modified_base 4: mod_base = OTHER; note = 2'-O-methyladenosine-3'-phosphate
  modified_base 5: mod_base = OTHER; note = 2'-O-methylguanosine-3'-phosphate
  modified_base 6: mod_base = OTHER; note = 2'-deoxy-2'-fluoroadenosine-3'-phosphate
  modified_base 7: mod_base = OTHER; note = 2'-O-methyluridine-3'-phosphate
  modified_base 8: mod_base = OTHER; note = 2'-O-methylguanosine-3'-phosphate
  modified_base 9: mod_base = OTHER; note = 2'-O-methylguanosine-3'-phosphate
  modified_base 10: mod_base = OTHER; note = 2'-O-methyluridine-3'-phosphate
  modified_base 11: mod_base = OTHER; note = 2'-O-methylguanosine-3'-phosphate
  modified_base 12: mod_base = OTHER; note = 2'-O-methylguanosine-3'-phosphate
  modified_base 13: mod_base = OTHER; note = 2'-O-methyladenosine-3'-phosphate
  modified_base 14: mod_base = OTHER; note = 2'-deoxy-2'-fluoroguanosine-3'-phosphate
  modified_base 15: mod_base = OTHER; note = 2'-O-methylguanosine-3'-phosphate
  modified_base 16: mod_base = OTHER; note = 2'-deoxy-2'-fluorouridine-3'-phosphate
  modified_base 17: mod_base = OTHER; note = 2'-O-methylguanosine-3'-phosphate
  modified_base 18: mod_base = OTHER; note = 2'-O-methyluridine-3'-phosphate
  modified_base 19: mod_base = OTHER; note = 2'-O-methyluridine-3'-phosphate
  modified_base 20: mod_base = OTHER; note = 2'-O-methylguanosine-3'-phosphate
  modified_base 21: mod_base = OTHER; note = 2'-O-methyluridine-3'-phosphate
  modified_base 22: mod_base = OTHER; note = 2'-O-methylguanosine-3'-phosphate
  modified_base 23: mod_base = OTHER; note = 2'-O-methylcytidine
tgaagatggtggaggtgttgtgc

SEQ ID NO: 4809 - RNA, 23 nt, synthetic construct
  source 1..23: mol_type = other RNA
  modified_base 1: mod_base = OTHER; note = 2'-O-methyluridine-3'-phosphate 5'phosphate
  modified_base 2: mod_base = OTHER; note = 2'-deoxy-2'-fluoroadenosine-3'-phosphate
  modified_base 3: mod_base = OTHER; note = 2'-O-methylguanosine-3'-phosphate
  modified_base 4: mod_base = OTHER; note = 2'-O-methyladenosine-3'-phosphate
  modified_base 5: mod_base = OTHER; note = 2'-O-methyladenosine-3'-phosphate
  modified_base 6: mod_base = OTHER; note = 2'-deoxy-2'-fluoroguanosine-3'-phosphate
  modified_base 7: mod_base = OTHER; note = 2'-O-methyladenosine-3'-phosphate
  modified_base 8: mod_base = OTHER; note = 2'-O-methyluridine-3'-phosphate
  modified_base 9: mod_base = OTHER; note = 2'-O-methylguanosine-3'-phosphate
  modified_base 10: mod_base = OTHER; note = 2'-O-methylguanosine-3'-phosphate
  modified_base 11: mod_base = OTHER; note = 2'-O-methyluridine-3'-phosphate
  modified_base 12: mod_base = OTHER; note = 2'-O-methylguanosine-3'-phosphate
  modified_base 13: mod_base = OTHER; note = 2'-O-methylguanosine-3'-phosphate
  modified_base 14: mod_base = OTHER; note = 2'-deoxy-2'-fluoroadenosine-3'-phosphate
  modified_base 15: mod_base = OTHER; note = 2'-O-methylguanosine-3'-phosphate
  modified_base 16: mod_base = OTHER; note = 2'-deoxy-2'-fluoroguanosine-3'-phosphate
  modified_base 17: mod_base = OTHER; note = 2'-O-methyluridine-3'-phosphate
  modified_base 18: mod_base = OTHER; note = 2'-O-methylguanosine-3'-phosphate
  modified_base 19: mod_base = OTHER; note = 2'-O-methyluridine-3'-phosphate
  modified_base 20: mod_base = OTHER; note = 2'-O-methyluridine-3'-phosphate
  modified_base 21: mod_base = OTHER; note = 2'-O-methylguanosine-3'-phosphate
  modified_base 22: mod_base = OTHER; note = 2'-O-methyluridine-3'-phosphate
  modified_base 23: mod_base = OTHER; note = 2'-O-methylguanosine
tagaagatggtggaggtgttgtg

SEQ ID NO: 4810 - RNA, 23 nt, synthetic construct
  source 1..23: mol_type = other RNA
  modified_base 1: mod_base = OTHER; note = 2'-O-methyluridine-3'-phosphate 5'phosphate
  modified_base 2: mod_base = OTHER; note = 2'-deoxy-2'-fluoroadenosine-3'-phosphate
  modified_base 3: mod_base = OTHER; note = 2'-O-methylcytidine-3'-phosphate
  modified_base 4: mod_base = OTHER; note = 2'-O-methylcytidine-3'-phosphate
  modified_base 5: mod_base = OTHER; note = 2'-O-methyladenosine-3'-phosphate
  modified_base 6: mod_base = OTHER; note = 2'-deoxy-2'-fluoroguanosine-3'-phosphate
  modified_base 7: mod_base = OTHER; note = 2'-O-methyladenosine-3'-phosphate
  modified_base 8: mod_base = OTHER; note = 2'-O-methyladenosine-3'-phosphate
  modified_base 9: mod_base = OTHER; note = 2'-O-methylguanosine-3'-phosphate
  modified_base 10: mod_base = OTHER; note = 2'-O-methyladenosine-3'-phosphate
  modified_base 11: mod_base = OTHER; note = 2'-O-methyluridine-3'-phosphate
  modified_base 12: mod_base = OTHER; note = 2'-O-methylguanosine-3'-phosphate
  modified_base 13: mod_base = OTHER; note = 2'-O-methylguanosine-3'-phosphate
  modified_base 14: mod_base = OTHER; note = 2'-deoxy-2'-fluorouridine-3'-phosphate
  modified_base 15: mod_base = OTHER; note = 2'-O-methylguanosine-3'-phosphate
  modified_base 16: mod_base = OTHER; note = 2'-deoxy-2'-fluoroguanosine-3'-phosphate
  modified_base 17: mod_base = OTHER; note = 2'-O-methyladenosine-3'-phosphate
  modified_base 18: mod_base = OTHER; note = 2'-O-methylguanosine-3'-phosphate
  modified_base 19: mod_base = OTHER; note = 2'-O-methylguanosine-3'-phosphate
  modified_base 20: mod_base = OTHER; note = 2'-O-methyluridine-3'-phosphate
  modified_base 21: mod_base = OTHER; note = 2'-O-methylguanosine-3'-phosphate
  modified_base 22: mod_base = OTHER; note = 2'-O-methyluridine-3'-phosphate
  modified_base 23: mod_base = OTHER; note = 2'-O-methyluridine
taccagaagatggtggaggtgtt

SEQ ID NO: 4811 - RNA, 23 nt, synthetic construct
  source 1..23: mol_type = other RNA
  modified_base 1: mod_base = OTHER; note = 2'-O-methyluridine-3'-phosphate 5'phosphate
  modified_base 2: mod_base = OTHER; note = 2'-deoxy-2'-fluoroguanosine-3'-phosphate
  modified_base 3: mod_base = OTHER; note = 2'-O-methyladenosine-3'-phosphate
  modified_base 4: mod_base = OTHER; note = 2'-O-methylcytidine-3'-phosphate
  modified_base 5: mod_base = OTHER; note = 2'-O-methylcytidine-3'-phosphate
  modified_base 6: mod_base = OTHER; note = 2'-deoxy-2'-fluoroadenosine-3'-phosphate
  modified_base 7: mod_base = OTHER; note = 2'-O-methylguanosine-3'-phosphate
  modified_base 8: mod_base = OTHER; note = 2'-O-methyladenosine-3'-phosphate
  modified_base 9: mod_base = OTHER; note = 2'-O-methyladenosine-3'-phosphate
  modified_base 10: mod_base = OTHER; note = 2'-O-methylguanosine-3'-phosphate
  modified_base 11: mod_base = OTHER; note = 2'-O-methyladenosine-3'-phosphate
  modified_base 12: mod_base = OTHER; note = 2'-O-methyluridine-3'-phosphate
  modified_base 13: mod_base = OTHER; note = 2'-O-methylguanosine-3'-phosphate
  modified_base 14: mod_base = OTHER; note = 2'-deoxy-2'-fluoroguanosine-3'-phosphate
  modified_base 15: mod_base = OTHER; note = 2'-O-methyluridine-3'-phosphate
  modified_base 16: mod_base = OTHER; note = 2'-deoxy-2'-fluoroguanosine-3'-phosphate
  modified_base 17: mod_base = OTHER; note = 2'-O-methylguanosine-3'-phosphate
  modified_base 18: mod_base = OTHER; note = 2'-O-methyladenosine-3'-phosphate
  modified_base 19: mod_base = OTHER; note = 2'-O-methylguanosine-3'-phosphate
  modified_base 20: mod_base = OTHER; note = 2'-O-methylguanosine-3'-phosphate
  modified_base 21: mod_base = OTHER; note = 2'-O-methyluridine-3'-phosphate
  modified_base 22: mod_base = OTHER; note = 2'-O-methylguanosine-3'-phosphate
  modified_base 23: mod_base = OTHER; note = 2'-O-methyluridine
tgaccagaagatggtggaggtgt

SEQ ID NO: 4812 - RNA, 23 nt, synthetic construct
  source 1..23: mol_type = other RNA
  modified_base 1: mod_base = OTHER; note = 2'-O-methyluridine-3'-phosphate 5'phosphate
  modified_base 2: mod_base = OTHER; note = 2'-deoxy-2'-fluoroguanosine-3'-phosphate
  modified_base 3: mod_base = OTHER; note = 2'-O-methylguanosine-3'-phosphate
  modified_base 4: mod_base = OTHER; note = 2'-O-methyladenosine-3'-phosphate
  modified_base 5: mod_base = OTHER; note = 2'-O-methylcytidine-3'-phosphate
  modified_base 6: mod_base = OTHER; note = 2'-deoxy-2'-fluorocytidine-3'-phosphate
  modified_base 7: mod_base = OTHER; note = 2'-O-methyladenosine-3'-phosphate
  modified_base 8: mod_base = OTHER; note = 2'-O-methylguanosine-3'-phosphate
  modified_base 9: mod_base = OTHER; note = 2'-O-methyladenosine-3'-phosphate
  modified_base 10: mod_base = OTHER; note = 2'-O-methyladenosine-3'-phosphate
  modified_base 11: mod_base = OTHER; note = 2'-O-methylguanosine-3'-phosphate
  modified_base 12: mod_base = OTHER; note = 2'-O-methyladenosine-3'-phosphate
  modified_base 13: mod_base = OTHER; note = 2'-O-methyluridine-3'-phosphate
  modified_base 14: mod_base = OTHER; note = 2'-deoxy-2'-fluoroguanosine-3'-phosphate
  modified_base 15: mod_base = OTHER; note = 2'-O-methylguanosine-3'-phosphate
  modified_base 16: mod_base = OTHER; note = 2'-deoxy-2'-fluorouridine-3'-phosphate
  modified_base 17: mod_base = OTHER; note = 2'-O-methylguanosine-3'-phosphate
  modified_base 18: mod_base = OTHER; note = 2'-O-methylguanosine-3'-phosphate
  modified_base 19: mod_base = OTHER; note = 2'-O-methyladenosine-3'-phosphate
  modified_base 20: mod_base = OTHER; note = 2'-O-methylguanosine-3'-phosphate
  modified_base 21: mod_base = OTHER; note = 2'-O-methylguanosine-3'-phosphate
  modified_base 22: mod_base = OTHER; note = 2'-O-methyluridine-3'-phosphate
  modified_base 23: mod_base = OTHER; note = 2'-O-methylguanosine
tggaccagaagatggtggaggtg

SEQ ID NO: 4813 - RNA, 23 nt, synthetic construct
  source 1..23: mol_type = other RNA
  modified_base 1: mod_base = OTHER; note = 2'-O-methyluridine-3'-phosphate 5'phosphate
  modified_base 2: mod_base = OTHER; note = 2'-deoxy-2'-fluoroguanosine-3'-phosphate
  modified_base 3: mod_base = OTHER; note = 2'-O-methylguanosine-3'-phosphate
  modified_base 4: mod_base = OTHER; note = 2'-O-methylguanosine-3'-phosphate
  modified_base 5: mod_base = OTHER; note = 2'-O-methyladenosine-3'-phosphate
  modified_base 6: mod_base = OTHER; note = 2'-deoxy-2'-fluorocytidine-3'-phosphate
  modified_base 7: mod_base = OTHER; note = 2'-O-methylcytidine-3'-phosphate
  modified_base 8: mod_base = OTHER; note = 2'-O-methyladenosine-3'-phosphate
  modified_base 9: mod_base = OTHER; note = 2'-O-methylguanosine-3'-phosphate
  modified_base 10: mod_base = OTHER; note = 2'-O-methyladenosine-3'-phosphate
  modified_base 11: mod_base = OTHER; note = 2'-O-methyladenosine-3'-phosphate
  modified_base 12: mod_base = OTHER; note = 2'-O-methylguanosine-3'-phosphate
  modified_base 13: mod_base = OTHER; note = 2'-O-methyladenosine-3'-phosphate
  modified_base 14: mod_base = OTHER; note = 2'-deoxy-2'-fluorouridine-3'-phosphate
  modified_base 15: mod_base = OTHER; note = 2'-O-methylguanosine-3'-phosphate
  modified_base 16: mod_base = OTHER; note = 2'-deoxy-2'-fluoroguanosine-3'-phosphate
  modified_base 17: mod_base = OTHER; note = 2'-O-methyluridine-3'-phosphate
  modified_base 18: mod_base = OTHER; note = 2'-O-methylguanosine-3'-phosphate
  modified_base 19: mod_base = OTHER; note = 2'-O-methylguanosine-3'-phosphate
  modified_base 20: mod_base = OTHER; note = 2'-O-methyladenosine-3'-phosphate
  modified_base 21: mod_base = OTHER; note = 2'-O-methylguanosine-3'-phosphate
  modified_base 22: mod_base = OTHER; note = 2'-O-methylguanosine-3'-phosphate
  modified_base 23: mod_base = OTHER; note = 2'-O-methyluridine
tgggaccagaagatggtggaggt

SEQ ID NO: 4814 - RNA, 23 nt, synthetic construct
  source 1..23: mol_type = other RNA
  modified_base 1: mod_base = OTHER; note = 2'-O-methyluridine-3'-phosphate 5'phosphate
  modified_base 2: mod_base = OTHER; note = 2'-deoxy-2'-fluorouridine-3'-phosphate
  modified_base 3: mod_base = OTHER; note = 2'-O-methylguanosine-3'-phosphate
  modified_base 4: mod_base = OTHER; note = 2'-O-methylguanosine-3'-phosphate
  modified_base 5: mod_base = OTHER; note = 2'-O-methylguanosine-3'-phosphate
  modified_base 6: mod_base = OTHER; note = 2'-deoxy-2'-fluoroadenosine-3'-phosphate
  modified_base 7: mod_base = OTHER; note = 2'-O-methylcytidine-3'-phosphate
  modified_base 8: mod_base = OTHER; note = 2'-O-methylcytidine-3'-phosphate
  modified_base 9: mod_base = OTHER; note = 2'-O-methyladenosine-3'-phosphate
  modified_base 10: mod_base = OTHER; note = 2'-O-methylguanosine-3'-phosphate
  modified_base 11: mod_base = OTHER; note = 2'-O-methyladenosine-3'-phosphate
  modified_base 12: mod_base = OTHER; note = 2'-O-methyladenosine-3'-phosphate
  modified_base 13: mod_base = OTHER; note = 2'-O-methylguanosine-3'-phosphate
  modified_base 14: mod_base = OTHER; note = 2'-deoxy-2'-fluoroadenosine-3'-phosphate
  modified_base 15: mod_base = OTHER; note = 2'-O-methyluridine-3'-phosphate
  modified_base 16: mod_base = OTHER; note = 2'-deoxy-2'-fluoroguanosine-3'-phosphate
  modified_base 17: mod_base = OTHER; note = 2'-O-methylguanosine-3'-phosphate
  modified_base 18: mod_base = OTHER; note = 2'-O-methyluridine-3'-phosphate
  modified_base 19: mod_base = OTHER; note = 2'-O-methylguanosine-3'-phosphate
  modified_base 20: mod_base = OTHER; note = 2'-O-methylguanosine-3'-phosphate
  modified_base 21: mod_base = OTHER; note = 2'-O-methyladenosine-3'-phosphate
  modified_base 22: mod_base = OTHER; note = 2'-O-methylguanosine-3'-phosphate
  modified_base 23: mod_base = OTHER; note = 2'-O-methylguanosine
ttgggaccagaagatggtggagg

SEQ ID NO: 4815 - RNA, 23 nt, synthetic construct
  source 1..23: mol_type = other RNA
  modified_base 1: mod_base = OTHER; note = 2'-O-methyluridine-3'-phosphate 5'phosphate
  modified_base 2: mod_base = OTHER; note = 2'-deoxy-2'-fluoroguanosine-3'-phosphate
  modified_base 3: mod_base = OTHER; note = 2'-O-methyluridine-3'-phosphate
  modified_base 4: mod_base = OTHER; note = 2'-O-methylguanosine-3'-phosphate
  modified_base 5: mod_base = OTHER; note = 2'-O-methylguanosine-3'-phosphate
  modified_base 6: mod_base = OTHER; note = 2'-deoxy-2'-fluoroguanosine-3'-phosphate
  modified_base 7: mod_base = OTHER; note = 2'-O-methyladenosine-3'-phosphate
  modified_base 8: mod_base = OTHER; note = 2'-O-methylcytidine-3'-phosphate
  modified_base 9: mod_base = OTHER; note = 2'-O-methylcytidine-3'-phosphate
  modified_base 10: mod_base = OTHER; note = 2'-O-methyladenosine-3'-phosphate
  modified_base 11: mod_base = OTHER; note = 2'-O-methylguanosine-3'-phosphate
  modified_base 12: mod_base = OTHER; note = 2'-O-methyladenosine-3'-phosphate
  modified_base 13: mod_base = OTHER; note = 2'-O-methyladenosine-3'-phosphate
  modified_base 14: mod_base = OTHER; note = 2'-deoxy-2'-fluoroguanosine-3'-phosphate
  modified_base 15: mod_base = OTHER; note = 2'-O-methyladenosine-3'-phosphate
  modified_base 16: mod_base = OTHER; note = 2'-deoxy-2'-fluorouridine-3'-phosphate
  modified_base 17: mod_base = OTHER; note = 2'-O-methylguanosine-3'-phosphate
  modified_base 18: mod_base = OTHER; note = 2'-O-methylguanosine-3'-phosphate
  modified_base 19: mod_base = OTHER; note = 2'-O-methyluridine-3'-phosphate
  modified_base 20: mod_base = OTHER; note = 2'-O-methylguanosine-3'-phosphate
  modified_base 21: mod_base = OTHER; note = 2'-O-methylguanosine-3'-phosphate
  modified_base 22: mod_base = OTHER; note = 2'-O-methyladenosine-3'-phosphate
  modified_base 23: mod_base = OTHER; note = 2'-O-methylguanosine
tgtgggaccagaagatggtggag

SEQ ID NO: 4816 - RNA, 23 nt, synthetic construct
  source 1..23: mol_type = other RNA
  modified_base 1: mod_base = OTHER; note = 2'-O-methyluridine-3'-phosphate 5'phosphate
  modified_base 2: mod_base = OTHER; note = 2'-deoxy-2'-fluoroguanosine-3'-phosphate
  modified_base 3: mod_base = OTHER; note = 2'-O-methylguanosine-3'-phosphate
  modified_base 4: mod_base = OTHER; note = 2'-O-methyluridine-3'-phosphate
  modified_base 5: mod_base = OTHER; note = 2'-O-methylguanosine-3'-phosphate
  modified_base 6: mod_base = OTHER; note = 2'-deoxy-2'-fluoroguanosine-3'-phosphate
  modified_base 7: mod_base = OTHER; note = 2'-O-methylguanosine-3'-phosphate
  modified_base 8: mod_base = OTHER; note = 2'-O-methyladenosine-3'-phosphate
  modified_base 9: mod_base = OTHER; note = 2'-O-methylcytidine-3'-phosphate
  modified_base 10: mod_base = OTHER; note = 2'-O-methylcytidine-3'-phosphate
  modified_base 11: mod_base = OTHER; note = 2'-O-methyladenosine-3'-phosphate
  modified_base 12: mod_base = OTHER; note = 2'-O-methylguanosine-3'-phosphate
  modified_base 13: mod_base = OTHER; note = 2'-O-methyladenosine-3'-phosphate
  modified_base 14: mod_base = OTHER; note = 2'-deoxy-2'-fluoroadenosine-3'-phosphate
  modified_base 15: mod_base = OTHER; note = 2'-O-methylguanosine-3'-phosphate
  modified_base 16: mod_base = OTHER; note = 2'-deoxy-2'-fluoroadenosine-3'-phosphate
  modified_base 17: mod_base = OTHER; note = 2'-O-methyluridine-3'-phosphate
  modified_base 18: mod_base = OTHER; note = 2'-O-methylguanosine-3'-phosphate
  modified_base 19: mod_base = OTHER; note = 2'-O-methylguanosine-3'-phosphate
  modified_base 20: mod_base = OTHER; note = 2'-O-methyluridine-3'-phosphate
  modified_base 21: mod_base = OTHER; note = 2'-O-methylguanosine-3'-phosphate
  modified_base 22: mod_base = OTHER; note = 2'-O-methylguanosine-3'-phosphate
  modified_base 23: mod_base = OTHER; note = 2'-O-methyladenosine
tggtgggaccagaagatggtgga

SEQ ID NO: 4817 - RNA, 23 nt, synthetic construct
  source 1..23: mol_type = other RNA
  modified_base 1: mod_base = OTHER; note = 2'-O-methyluridine-3'-phosphate 5'phosphate
  modified_base 2: mod_base = OTHER; note = 2'-deoxy-2'-fluoroguanosine-3'-phosphate
  modified_base 3: mod_base = OTHER; note = 2'-O-methyluridine-3'-phosphate
  modified_base 4: mod_base = OTHER; note = 2'-O-methyladenosine-3'-phosphate
  modified_base 5: mod_base = OTHER; note = 2'-O-methylguanosine-3'-phosphate
  modified_base 6: mod_base = OTHER; note = 2'-deoxy-2'-fluoroguanosine-3'-phosphate
  modified_base 7: mod_base = OTHER; note = 2'-O-methyluridine-3'-phosphate
  modified_base 8: mod_base = OTHER; note = 2'-O-methylguanosine-3'-phosphate
  modified_base 9: mod_base = OTHER; note = 2'-O-methylguanosine-3'-phosphate
  modified_base 10: mod_base = OTHER; note = 2'-O-methylguanosine-3'-phosphate
  modified_base 11: mod_base = OTHER; note = 2'-O-methyladenosine-3'-phosphate
  modified_base 12: mod_base = OTHER; note = 2'-O-methylcytidine-3'-phosphate
  modified_base 13: mod_base = OTHER; note = 2'-O-methylcytidine-3'-phosphate
  modified_base 14: mod_base = OTHER; note = 2'-deoxy-2'-fluoroadenosine-3'-phosphate
  modified_base 15: mod_base = OTHER; note = 2'-O-methylguanosine-3'-phosphate
  modified_base 16: mod_base = OTHER; note = 2'-deoxy-2'-fluoroadenosine-3'-phosphate
  modified_base 17: mod_base = OTHER; note = 2'-O-methyladenosine-3'-phosphate
  modified_base 18: mod_base = OTHER; note = 2'-O-methylguanosine-3'-phosphate
  modified_base 19: mod_base = OTHER; note = 2'-O-methyladenosine-3'-phosphate
  modified_base 20: mod_base = OTHER; note = 2'-O-methyluridine-3'-phosphate
  modified_base 21: mod_base = OTHER; note = 2'-O-methylguanosine-3'-phosphate
  modified_base 22: mod_base = OTHER; note = 2'-O-methylguanosine-3'-phosphate
  modified_base 23: mod_base = OTHER; note = 2'-O-methyluridine
tgtaggtgggaccagaagatggt

SEQ ID NO: 4818 - RNA, 23 nt, synthetic construct
  source 1..23: mol_type = other RNA
  modified_base 1: mod_base = OTHER; note = 2'-O-methyluridine-3'-phosphate 5'phosphate
  modified_base 2: mod_base = OTHER; note = 2'-deoxy-2'-fluoroadenosine-3'-phosphate
  modified_base 3: mod_base = OTHER; note = 2'-O-methylcytidine-3'-phosphate
  modified_base 4: mod_base = OTHER; note = 2'-O-methyluridine-3'-phosphate
  modified_base 5: mod_base = OTHER; note = 2'-O-methylguanosine-3'-phosphate
  modified_base 6: mod_base = OTHER; note = 2'-deoxy-2'-fluoroguanosine-3'-phosphate
  modified_base 7: mod_base = OTHER; note = 2'-O-methyluridine-3'-phosphate
  modified_base 8: mod_base = OTHER; note = 2'-O-methyladenosine-3'-phosphate
  modified_base 9: mod_base = OTHER; note = 2'-O-methylguanosine-3'-phosphate
  modified_base 10: mod_base = OTHER; note = 2'-O-methylguanosine-3'-phosphate
  modified_base 11: mod_base = OTHER; note = 2'-O-methyluridine-3'-phosphate
  modified_base 12: mod_base = OTHER; note = 2'-O-methylguanosine-3'-phosphate
  modified_base 13: mod_base = OTHER; note = 2'-O-methylguanosine-3'-phosphate
  modified_base 14: mod_base = OTHER; note = 2'-deoxy-2'-fluoroguanosine-3'-phosphate
  modified_base 15: mod_base = OTHER; note = 2'-O-methyladenosine-3'-phosphate
  modified_base 16: mod_base = OTHER; note = 2'-deoxy-2'-fluorocytidine-3'-phosphate
  modified_base 17: mod_base = OTHER; note = 2'-O-methylcytidine-3'-phosphate
  modified_base 18: mod_base = OTHER; note = 2'-O-methyladenosine-3'-phosphate
  modified_base 19: mod_base = OTHER; note = 2'-O-methylguanosine-3'-phosphate
  modified_base 20: mod_base = OTHER; note = 2'-O-methyladenosine-3'-phosphate
  modified_base 21: mod_base = OTHER; note = 2'-O-methyladenosine-3'-phosphate
  modified_base 22: mod_base = OTHER; note = 2'-O-methylguanosine-3'-phosphate
  modified_base 23: mod_base = OTHER; note = 2'-O-methyladenosine
tactggtaggtgggaccagaaga

SEQ ID NO: 4819 - RNA, 23 nt, synthetic construct
  source 1..23: mol_type = other RNA
  modified_base 1: mod_base = OTHER; note = 2'-O-methyluridine-3'-phosphate 5'phosphate
  modified_base 2: mod_base = OTHER; note = 2'-deoxy-2'-fluorocytidine-3'-phosphate
  modified_base 3: mod_base = OTHER; note = 2'-O-methyladenosine-3'-phosphate
  modified_base 4: mod_base = OTHER; note = 2'-O-methylcytidine-3'-phosphate
  modified_base 5: mod_base = OTHER; note = 2'-O-methyluridine-3'-phosphate
  modified_base 6: mod_base = OTHER; note = 2'-deoxy-2'-fluoroguanosine-3'-phosphate
  modified_base 7: mod_base = OTHER; note = 2'-O-methylguanosine-3'-phosphate
  modified_base 8: mod_base = OTHER; note = 2'-O-methyluridine-3'-phosphate
  modified_base 9: mod_base = OTHER; note = 2'-O-methyladenosine-3'-phosphate
  modified_base 10: mod_base = OTHER; note = 2'-O-methylguanosine-3'-phosphate
  modified_base 11: mod_base = OTHER; note = 2'-O-methylguanosine-3'-phosphate
  modified_base 12: mod_base = OTHER; note = 2'-O-methyluridine-3'-phosphate
  modified_base 13: mod_base = OTHER; note = 2'-O-methylguanosine-3'-phosphate
  modified_base 14: mod_base = OTHER; note = 2'-deoxy-2'-fluoroguanosine-3'-phosphate
  modified_base 15: mod_base = OTHER; note = 2'-O-methylguanosine-3'-phosphate
  modified_base 16: mod_base = OTHER; note = 2'-deoxy-2'-fluoroadenosine-3'-phosphate
  modified_base 17: mod_base = OTHER; note = 2'-O-methylcytidine-3'-phosphate
  modified_base 18: mod_base = OTHER; note = 2'-O-methylcytidine-3'-phosphate
  modified_base 19: mod_base = OTHER; note = 2'-O-methyladenosine-3'-phosphate
  modified_base 20: mod_base = OTHER; note = 2'-O-methylguanosine-3'-phosphate
  modified_base 21: mod_base = OTHER; note = 2'-O-methyladenosine-3'-phosphate
  modified_base 22: mod_base = OTHER; note = 2'-O-methyladenosine-3'-phosphate
  modified_base 23: mod_base = OTHER; note = 2'-O-methylguanosine
tcactggtaggtgggaccagaag

SEQ ID NO: 4820 - RNA, 23 nt, synthetic construct
  source 1..23: mol_type = other RNA
  modified_base 1: mod_base = OTHER; note = 2'-O-methyluridine-3'-phosphate 5'phosphate
  modified_base 2: mod_base = OTHER; note = 2'-deoxy-2'-fluoroadenosine-3'-phosphate
  modified_base 3: mod_base = OTHER; note = 2'-O-methylcytidine-3'-phosphate
  modified_base 4: mod_base = OTHER; note = 2'-O-methyladenosine-3'-phosphate
  modified_base 5: mod_base = OTHER; note = 2'-O-methylcytidine-3'-phosphate
  modified_base 6: mod_base = OTHER; note = 2'-deoxy-2'-fluorouridine-3'-phosphate
  modified_base 7: mod_base = OTHER; note = 2'-O-methylguanosine-3'-phosphate
  modified_base 8: mod_base = OTHER; note = 2'-O-methylguanosine-3'-phosphate
  modified_base 9: mod_base = OTHER; note = 2'-O-methyluridine-3'-phosphate
  modified_base 10: mod_base = OTHER; note = 2'-O-methyladenosine-3'-phosphate
  modified_base 11: mod_base = OTHER; note = 2'-O-methylguanosine-3'-phosphate
  modified_base 12: mod_base = OTHER; note = 2'-O-methylguanosine-3'-phosphate
  modified_base 13: mod_base = OTHER; note = 2'-O-methyluridine-3'-phosphate
  modified_base 14: mod_base = OTHER; note = 2'-deoxy-2'-fluoroguanosine-3'-phosphate
  modified_base 15: mod_base = OTHER; note = 2'-O-methylguanosine-3'-phosphate
  modified_base 16: mod_base = OTHER; note = 2'-deoxy-2'-fluoroguanosine-3'-phosphate
  modified_base 17: mod_base = OTHER; note = 2'-O-methyladenosine-3'-phosphate
  modified_base 18: mod_base = OTHER; note = 2'-O-methylcytidine-3'-phosphate
  modified_base 19: mod_base = OTHER; note = 2'-O-methylcytidine-3'-phosphate
  modified_base 20: mod_base = OTHER; note = 2'-O-methyladenosine-3'-phosphate
  modified_base 21: mod_base = OTHER; note = 2'-O-methylguanosine-3'-phosphate
  modified_base 22: mod_base = OTHER; note = 2'-O-methyladenosine-3'-phosphate
  modified_base 23: mod_base = OTHER; note = 2'-O-methyladenosine
tacactggtaggtgggaccagaa

SEQ ID NO: 4821 - RNA, 23 nt, synthetic construct
  source 1..23: mol_type = other RNA
  modified_base 1: mod_base = OTHER; note = 2'-O-methyluridine-3'-phosphate 5'phosphate
  modified_base 2: mod_base = OTHER; note = 2'-deoxy-2'-fluoroguanosine-3'-phosphate
  modified_base 3: mod_base = OTHER; note = 2'-O-methyladenosine-3'-phosphate
  modified_base 4: mod_base = OTHER; note = 2'-O-methylcytidine-3'-phosphate
  modified_base 5: mod_base = OTHER; note = 2'-O-methyladenosine-3'-phosphate
  modified_base 6: mod_base = OTHER; note = 2'-deoxy-2'-fluorocytidine-3'-phosphate
  modified_base 7: mod_base = OTHER; note = 2'-O-methyluridine-3'-phosphate
  modified_base 8: mod_base = OTHER; note = 2'-O-methylguanosine-3'-phosphate
  modified_base 9: mod_base = OTHER; note = 2'-O-methylguanosine-3'-phosphate
  modified_base 10: mod_base = OTHER; note = 2'-O-methyluridine-3'-phosphate
  modified_base 11: mod_base = OTHER; note = 2'-O-methyladenosine-3'-phosphate
  modified_base 12: mod_base = OTHER; note = 2'-O-methylguanosine-3'-phosphate
  modified_base 13: mod_base = OTHER; note = 2'-O-methylguanosine-3'-phosphate
  modified_base 14: mod_base = OTHER; note = 2'-deoxy-2'-fluorouridine-3'-phosphate
  modified_base 15: mod_base = OTHER; note = 2'-O-methylguanosine-3'-phosphate
  modified_base 16: mod_base = OTHER; note = 2'-deoxy-2'-fluoroguanosine-3'-phosphate
  modified_base 17: mod_base = OTHER; note = 2'-O-methylguanosine-3'-phosphate
  modified_base 18: mod_base = OTHER; note = 2'-O-methyladenosine-3'-phosphate
  modified_base 19: mod_base = OTHER; note = 2'-O-methylcytidine-3'-phosphate
  modified_base 20: mod_base = OTHER; note = 2'-O-methylcytidine-3'-phosphate
  modified_base 21: mod_base = OTHER; note = 2'-O-methyladenosine-3'-phosphate
  modified_base 22: mod_base = OTHER; note = 2'-O-methylguanosine-3'-phosphate
  modified_base 23: mod_base = OTHER; note = 2'-O-methyladenosine
tgacactggtaggtgggaccaga

SEQ ID NO: 4822 - RNA, 23 nt, synthetic construct
  source 1..23: mol_type = other RNA
  modified_base 1: mod_base = OTHER; note = 2'-O-methyluridine-3'-phosphate 5'phosphate
  modified_base 2: mod_base = OTHER; note = 2'-deoxy-2'-fluorouridine-3'-phosphate
  modified_base 3: mod_base = OTHER; note = 2'-O-methyluridine-3'-phosphate
  modified_base 4: mod_base = OTHER; note = 2'-O-methylcytidine-3'-phosphate
  modified_base 5: mod_base = OTHER; note = 2'-O-methyladenosine-3'-phosphate
  modified_base 6: mod_base = OTHER; note = 2'-deoxy-2'-fluoroguanosine-3'-phosphate
  modified_base 7: mod_base = OTHER; note = 2'-O-methyladenosine-3'-phosphate
  modified_base 8: mod_base = OTHER; note = 2'-O-methylcytidine-3'-phosphate
  modified_base 9: mod_base = OTHER; note = 2'-O-methyladenosine-3'-phosphate
  modified_base 10: mod_base = OTHER; note = 2'-O-methylcytidine-3'-phosphate
  modified_base 11: mod_base = OTHER; note = 2'-O-methyluridine-3'-phosphate
  modified_base 12: mod_base = OTHER; note = 2'-O-methylguanosine-3'-phosphate
  modified_base 13: mod_base = OTHER; note = 2'-O-methylguanosine-3'-phosphate
  modified_base 14: mod_base = OTHER; note = 2'-deoxy-2'-fluorouridine-3'-phosphate
  modified_base 15: mod_base = OTHER; note = 2'-O-methyladenosine-3'-phosphate
  modified_base 16: mod_base = OTHER; note = 2'-deoxy-2'-fluoroguanosine-3'-phosphate
  modified_base 17: mod_base = OTHER; note = 2'-O-methylguanosine-3'-phosphate
  modified_base 18: mod_base = OTHER; note = 2'-O-methyluridine-3'-phosphate
  modified_base 19: mod_base = OTHER; note = 2'-O-methylguanosine-3'-phosphate
  modified_base 20: mod_base = OTHER; note = 2'-O-methylguanosine-3'-phosphate
  modified_base 21: mod_base = OTHER; note = 2'-O-methylguanosine-3'-phosphate
  modified_base 22: mod_base = OTHER; note = 2'-O-methyladenosine-3'-phosphate
  modified_base 23: mod_base = OTHER; note = 2'-O-methylcytidine
tttcagacactggtaggtgggac

SEQ ID NO: 4823 - RNA, 23 nt, synthetic construct
  source 1..23: mol_type = other RNA
  modified_base 1: mod_base = OTHER; note = 2'-O-methyluridine-3'-phosphate 5'phosphate
  modified_base 2: mod_base = OTHER; note = 2'-deoxy-2'-fluorocytidine-3'-phosphate
  modified_base 3: mod_base = OTHER; note = 2'-O-methyluridine-3'-phosphate
  modified_base 4: mod_base = OTHER; note = 2'-O-methyluridine-3'-phosphate
  modified_base 5: mod_base = OTHER; note = 2'-O-methylcytidine-3'-phosphate
  modified_base 6: mod_base = OTHER; note = 2'-deoxy-2'-fluoroadenosine-3'-phosphate
  modified_base 7: mod_base = OTHER; note = 2'-O-methylguanosine-3'-phosphate
  modified_base 8: mod_base = OTHER; note = 2'-O-methyladenosine-3'-phosphate
  modified_base 9: mod_base = OTHER; note = 2'-O-methylcytidine-3'-phosphate
  modified_base 10: mod_base = OTHER; note = 2'-O-methyladenosine-3'-phosphate
  modified_base 11: mod_base = OTHER; note = 2'-O-methylcytidine-3'-phosphate
  modified_base 12: mod_base = OTHER; note = 2'-O-methyluridine-3'-phosphate
  modified_base 13: mod_base = OTHER; note = 2'-O-methylguanosine-3'-phosphate
  modified_base 14: mod_base = OTHER; note = 2'-deoxy-2'-fluoroguanosine-3'-phosphate
  modified_base 15: mod_base = OTHER; note = 2'-O-methyluridine-3'-phosphate
  modified_base 16: mod_base = OTHER; note = 2'-deoxy-2'-fluoroadenosine-3'-phosphate
  modified_base 17: mod_base = OTHER; note = 2'-O-methylguanosine-3'-phosphate
  modified_base 18: mod_base = OTHER; note = 2'-O-methylguanosine-3'-phosphate
  modified_base 19: mod_base = OTHER; note = 2'-O-methyluridine-3'-phosphate
  modified_base 20: mod_base = OTHER; note = 2'-O-methylguanosine-3'-phosphate
  modified_base 21: mod_base = OTHER; note = 2'-O-methylguanosine-3'-phosphate
  modified_base 22: mod_base = OTHER; note = 2'-O-methylguanosine-3'-phosphate
  modified_base 23: mod_base = OTHER; note = 2'-O-methyladenosine
tcttcagacactggtaggtggga

SEQ ID NO: 4824 - RNA, 23 nt, synthetic construct
  source 1..23: mol_type = other RNA
  modified_base 1: mod_base = OTHER; note = 2'-O-methyluridine-3'-phosphate 5'phosphate
  modified_base 2: mod_base = OTHER; note = 2'-deoxy-2'-fluorocytidine-3'-phosphate
  modified_base 3: mod_base = OTHER; note = 2'-O-methylcytidine-3'-phosphate
  modified_base 4: mod_base = OTHER; note = 2'-O-methylcytidine-3'-phosphate
  modified_base 5: mod_base = OTHER; note = 2'-O-methyluridine-3'-phosphate
  modified_base 6: mod_base = OTHER; note = 2'-deoxy-2'-fluorouridine-3'-phosphate
  modified_base 7: mod_base = OTHER; note = 2'-O-methylcytidine-3'-phosphate
  modified_base 8: mod_base = OTHER; note = 2'-O-methyladenosine-3'-phosphate
  modified_base 9: mod_base = OTHER; note = 2'-O-methylguanosine-3'-phosphate
  modified_base 10: mod_base = OTHER; note = 2'-O-methyladenosine-3'-phosphate
  modified_base 11: mod_base = OTHER; note = 2'-O-methylcytidine-3'-phosphate
  modified_base 12: mod_base = OTHER; note = 2'-O-methyladenosine-3'-phosphate
  modified_base 13: mod_base = OTHER; note = 2'-O-methylcytidine-3'-phosphate
  modified_base 14: mod_base = OTHER; note = 2'-deoxy-2'-fluorouridine-3'-phosphate
  modified_base 15: mod_base = OTHER; note = 2'-O-methylguanosine-3'-phosphate
  modified_base 16: mod_base = OTHER; note = 2'-deoxy-2'-fluoroguanosine-3'-phosphate
  modified_base 17: mod_base = OTHER; note = 2'-O-methyluridine-3'-phosphate
  modified_base 18: mod_base = OTHER; note = 2'-O-methyladenosine-3'-phosphate
  modified_base 19: mod_base = OTHER; note = 2'-O-methylguanosine-3'-phosphate
  modified_base 20: mod_base = OTHER; note = 2'-O-methylguanosine-3'-phosphate
  modified_base 21: mod_base = OTHER; note = 2'-O-methyluridine-3'-phosphate
  modified_base 22: mod_base = OTHER; note = 2'-O-methylguanosine-3'-phosphate
  modified_base 23: mod_base = OTHER; note = 2'-O-methylguanosine
tcccttcagacactggtaggtgg

SEQ ID NO: 4825 - RNA, 23 nt, synthetic construct
  source 1..23: mol_type = other RNA
  modified_base 1: mod_base = OTHER; note = 2'-O-methyluridine-3'-phosphate 5'phosphate
  modified_base 2: mod_base = OTHER; note = 2'-deoxy-2'-fluorouridine-3'-phosphate
  modified_base 3: mod_base = OTHER; note = 2'-O-methylcytidine-3'-phosphate
  modified_base 4: mod_base = OTHER; note = 2'-O-methylcytidine-3'-phosphate
  modified_base 5: mod_base = OTHER; note = 2'-O-methylcytidine-3'-phosphate
  modified_base 6: mod_base = OTHER; note = 2'-deoxy-2'-fluorouridine-3'-phosphate
  modified_base 7: mod_base = OTHER; note = 2'-O-methyluridine-3'-phosphate
  modified_base 8: mod_base = OTHER; note = 2'-O-methylcytidine-3'-phosphate
  modified_base 9: mod_base = OTHER; note = 2'-O-methyladenosine-3'-phosphate
  modified_base 10: mod_base = OTHER; note = 2'-O-methylguanosine-3'-phosphate
  modified_base 11: mod_base = OTHER; note = 2'-O-methyladenosine-3'-phosphate
  modified_base 12: mod_base = OTHER; note = 2'-O-methylcytidine-3'-phosphate
  modified_base 13: mod_base = OTHER; note = 2'-O-methyladenosine-3'-phosphate
  modified_base 14: mod_base = OTHER; note = 2'-deoxy-2'-fluorocytidine-3'-phosphate
  modified_base 15: mod_base = OTHER; note = 2'-O-methyluridine-3'-phosphate
  modified_base 16: mod_base = OTHER; note = 2'-deoxy-2'-fluoroguanosine-3'-phosphate
  modified_base 17: mod_base = OTHER; note = 2'-O-methylguanosine-3'-phosphate
  modified_base 18: mod_base = OTHER; note = 2'-O-methyluridine-3'-phosphate
  modified_base 19: mod_base = OTHER; note = 2'-O-methyladenosine-3'-phosphate
  modified_base 20: mod_base = OTHER; note = 2'-O-methylguanosine-3'-phosphate
  modified_base 21: mod_base = OTHER; note = 2'-O-methylguanosine-3'-phosphate
  modified_base 22: mod_base = OTHER; note = 2'-O-methyluridine-3'-phosphate
  modified_base 23: mod_base = OTHER; note = 2'-O-methylguanosine
ttcccttcagacactggtaggtg

SEQ ID NO: 4826 - RNA, 23 nt, synthetic construct
  source 1..23: mol_type = other RNA
  modified_base 1: mod_base = OTHER; note = 2'-O-methyluridine-3'-phosphate 5'phosphate
  modified_base 2: mod_base = OTHER; note = 2'-deoxy-2'-fluorouridine-3'-phosphate
  modified_base 3: mod_base = OTHER; note = 2'-O-methyluridine-3'-phosphate
  modified_base 4: mod_base = OTHER; note = 2'-O-methylcytidine-3'-phosphate
  modified_base 5: mod_base = OTHER; note = 2'-O-methylcytidine-3'-phosphate
  modified_base 6: mod_base = OTHER; note = 2'-deoxy-2'-fluorocytidine-3'-phosphate
  modified_base 7: mod_base = OTHER; note = 2'-O-methyluridine-3'-phosphate
  modified_base 8: mod_base = OTHER; note = 2'-O-methyluridine-3'-phosphate
  modified_base 9: mod_base = OTHER; note = 2'-O-methylcytidine-3'-phosphate
  modified_base 10: mod_base = OTHER; note = 2'-O-methyladenosine-3'-phosphate
  modified_base 11: mod_base = OTHER; note = 2'-O-methylguanosine-3'-phosphate
  modified_base 12: mod_base = OTHER; note = 2'-O-methyladenosine-3'-phosphate
  modified_base 13: mod_base = OTHER; note = 2'-O-methylcytidine-3'-phosphate
  modified_base 14: mod_base = OTHER; note = 2'-deoxy-2'-fluoroadenosine-3'-phosphate
  modified_base 15: mod_base = OTHER; note = 2'-O-methylcytidine-3'-phosphate
  modified_base 16: mod_base = OTHER; note = 2'-deoxy-2'-fluorouridine-3'-phosphate
  modified_base 17: mod_base = OTHER; note = 2'-O-methylguanosine-3'-phosphate
  modified_base 18: mod_base = OTHER; note = 2'-O-methylguanosine-3'-phosphate
  modified_base 19: mod_base = OTHER; note = 2'-O-methyluridine-3'-phosphate
  modified_base 20: mod_base = OTHER; note = 2'-O-methyladenosine-3'-phosphate
  modified_base 21: mod_base = OTHER; note = 2'-O-methylguanosine-3'-phosphate
  modified_base 22: mod_base = OTHER; note = 2'-O-methylguanosine-3'-phosphate
  modified_base 23: mod_base = OTHER; note = 2'-O-methyluridine
tttcccttcagacactggtaggt

SEQ ID NO: 4827 - RNA, 23 nt, synthetic construct
  source 1..23: mol_type = other RNA
  modified_base 1: mod_base = OTHER; note = 2'-O-methyluridine-3'-phosphate 5'phosphate
  modified_base 2: mod_base = OTHER; note = 2'-deoxy-2'-fluoroguanosine-3'-phosphate
  modified_base 3: mod_base = OTHER; note = 2'-O-methyluridine-3'-phosphate
  modified_base 4: mod_base = OTHER; note = 2'-O-methyluridine-3'-phosphate
  modified_base 5: mod_base = OTHER; note = 2'-O-methylcytidine-3'-phosphate
  modified_base 6: mod_base = OTHER; note = 2'-deoxy-2'-fluorocytidine-3'-phosphate
  modified_base 7: mod_base = OTHER; note = 2'-O-methylcytidine-3'-phosphate
  modified_base 8: mod_base = OTHER; note = 2'-O-methyluridine-3'-phosphate
  modified_base 9: mod_base = OTHER; note = 2'-O-methyluridine-3'-phosphate
  modified_base 10: mod_base = OTHER; note = 2'-O-methylcytidine-3'-phosphate
  modified_base 11: mod_base = OTHER; note = 2'-O-methyladenosine-3'-phosphate
  modified_base 12: mod_base = OTHER; note = 2'-O-methylguanosine-3'-phosphate
  modified_base 13: mod_base = OTHER; note = 2'-O-methyladenosine-3'-phosphate
  modified_base 14: mod_base = OTHER; note = 2'-deoxy-2'-fluorocytidine-3'-phosphate
  modified_base 15: mod_base = OTHER; note = 2'-O-methyladenosine-3'-phosphate
  modified_base 16: mod_base = OTHER; note = 2'-deoxy-2'-fluorocytidine-3'-phosphate
  modified_base 17: mod_base = OTHER; note = 2'-O-methyluridine-3'-phosphate
  modified_base 18: mod_base = OTHER; note = 2'-O-methylguanosine-3'-phosphate
  modified_base 19: mod_base = OTHER; note = 2'-O-methylguanosine-3'-phosphate
  modified_base 20: mod_base = OTHER; note = 2'-O-methyluridine-3'-phosphate
  modified_base 21: mod_base = OTHER; note = 2'-O-methyladenosine-3'-phosphate
  modified_base 22: mod_base = OTHER; note = 2'-O-methylguanosine-3'-phosphate
  modified_base 23: mod_base = OTHER; note = 2'-O-methylguanosine
tgttcccttcagacactggtagg

SEQ ID NO: 4828 - RNA, 23 nt, synthetic construct
  source 1..23: mol_type = other RNA
  modified_base 1: mod_base = OTHER; note = 2'-O-methyluridine-3'-phosphate 5'phosphate
  modified_base 2: mod_base = OTHER; note = 2'-deoxy-2'-fluorocytidine-3'-phosphate
  modified_base 3: mod_base = OTHER; note = 2'-O-methyladenosine-3'-phosphate
  modified_base 4: mod_base = OTHER; note = 2'-O-methylcytidine-3'-phosphate
  modified_base 5: mod_base = OTHER; note = 2'-O-methylcytidine-3'-phosphate
  modified_base 6: mod_base = OTHER; note = 2'-deoxy-2'-fluorouridine-3'-phosphate
  modified_base 7: mod_base = OTHER; note = 2'-O-methylguanosine-3'-phosphate
  modified_base 8: mod_base = OTHER; note = 2'-O-methyluridine-3'-phosphate
  modified_base 9: mod_base = OTHER; note = 2'-O-methyluridine-3'-phosphate
  modified_base 10: mod_base = OTHER; note = 2'-O-methylcytidine-3'-phosphate
  modified_base 11: mod_base = OTHER; note = 2'-O-methylcytidine-3'-phosphate
  modified_base 12: mod_base = OTHER; note = 2'-O-methylcytidine-3'-phosphate
  modified_base 13: mod_base = OTHER; note = 2'-O-methyluridine-3'-phosphate
  modified_base 14: mod_base = OTHER; note = 2'-deoxy-2'-fluorouridine-3'-phosphate
  modified_base 15: mod_base = OTHER; note = 2'-O-methylcytidine-3'-phosphate
  modified_base 16: mod_base = OTHER; note = 2'-deoxy-2'-fluoroadenosine-3'-phosphate
  modified_base 17: mod_base = OTHER; note = 2'-O-methylguanosine-3'-phosphate
  modified_base 18: mod_base = OTHER; note = 2'-O-methyladenosine-3'-phosphate
  modified_base 19: mod_base = OTHER; note = 2'-O-methylcytidine-3'-phosphate
  modified_base 20: mod_base = OTHER; note = 2'-O-methyladenosine-3'-phosphate
  modified_base 21: mod_base = OTHER; note = 2'-O-methylcytidine-3'-phosphate
  modified_base 22: mod_base = OTHER; note = 2'-O-methyluridine-3'-phosphate
  modified_base 23: mod_base = OTHER; note = 2'-O-methylguanosine
tcacctgttcccttcagacactg

SEQ ID NO: 4829 - RNA, 23 nt, synthetic construct
  source 1..23: mol_type = other RNA
  modified_base 1: mod_base = OTHER; note = 2'-O-methyluridine-3'-phosphate 5'phosphate
  modified_base 2: mod_base = OTHER; note = 2'-deoxy-2'-fluorouridine-3'-phosphate
  modified_base 3: mod_base = OTHER; note = 2'-O-methyluridine-3'-phosphate
  modified_base 4: mod_base = OTHER; note = 2'-O-methylcytidine-3'-phosphate
  modified_base 5: mod_base = OTHER; note = 2'-O-methyladenosine-3'-phosphate
  modified_base 6: mod_base = OTHER; note = 2'-deoxy-2'-fluorocytidine-3'-phosphate
  modified_base 7: mod_base = OTHER; note = 2'-O-methylcytidine-3'-phosphate
  modified_base 8: mod_base = OTHER; note = 2'-O-methyluridine-3'-phosphate
  modified_base 9: mod_base = OTHER; note = 2'-O-methylguanosine-3'-phosphate
  modified_base 10: mod_base = OTHER; note = 2'-O-methyluridine-3'-phosphate
  modified_base 11: mod_base = OTHER; note = 2'-O-methyluridine-3'-phosphate
  modified_base 12: mod_base = OTHER; note = 2'-O-methylcytidine-3'-phosphate
  modified_base 13: mod_base = OTHER; note = 2'-O-methylcytidine-3'-phosphate
  modified_base 14: mod_base = OTHER; note = 2'-deoxy-2'-fluorocytidine-3'-phosphate
  modified_base 15: mod_base = OTHER; note = 2'-O-methyluridine-3'-phosphate
  modified_base 16: mod_base = OTHER; note = 2'-deoxy-2'-fluorouridine-3'-phosphate
  modified_base 17: mod_base = OTHER; note = 2'-O-methylcytidine-3'-phosphate
  modified_base 18: mod_base = OTHER; note = 2'-O-methyladenosine-3'-phosphate
  modified_base 19: mod_base = OTHER; note = 2'-O-methylguanosine-3'-phosphate
  modified_base 20: mod_base = OTHER; note = 2'-O-methyladenosine-3'-phosphate
  modified_base 21: mod_base = OTHER; note = 2'-O-methylcytidine-3'-phosphate
  modified_base 22: mod_base = OTHER; note = 2'-O-methyladenosine-3'-phosphate
  modified_base 23: mod_base = OTHER; note = 2'-O-methylcytidine
tttcacctgttcccttcagacac

SEQ ID NO: 4830 - RNA, 23 nt, synthetic construct
  source 1..23: mol_type = other RNA
  modified_base 1: mod_base = OTHER; note = 2'-O-methyluridine-3'-phosphate 5'phosphate
  modified_base 2: mod_base = OTHER; note = 2'-deoxy-2'-fluorouridine-3'-phosphate
  modified_base 3: mod_base = OTHER; note = 2'-O-methyluridine-3'-phosphate
  modified_base 4: mod_base = OTHER; note = 2'-O-methyluridine-3'-phosphate
  modified_base 5: mod_base = OTHER; note = 2'-O-methylcytidine-3'-phosphate
  modified_base 6: mod_base = OTHER; note = 2'-deoxy-2'-fluoroadenosine-3'-phosphate
  modified_base 7: mod_base = OTHER; note = 2'-O-methylcytidine-3'-phosphate
  modified_base 8: mod_base = OTHER; note = 2'-O-methylcytidine-3'-phosphate
  modified_base 9: mod_base = OTHER; note = 2'-O-methyluridine-3'-phosphate
  modified_base 10: mod_base = OTHER; note = 2'-O-methylguanosine-3'-phosphate
  modified_base 11: mod_base = OTHER; note = 2'-O-methyluridine-3'-phosphate
  modified_base 12: mod_base = OTHER; note = 2'-O-methyluridine-3'-phosphate
  modified_base 13: mod_base = OTHER; note = 2'-O-methylcytidine-3'-phosphate
  modified_base 14: mod_base = OTHER; note = 2'-deoxy-2'-fluorocytidine-3'-phosphate
  modified_base 15: mod_base = OTHER; note = 2'-O-methylcytidine-3'-phosphate
  modified_base 16: mod_base = OTHER; note = 2'-deoxy-2'-fluorouridine-3'-phosphate
  modified_base 17: mod_base = OTHER; note = 2'-O-methyluridine-3'-phosphate
  modified_base 18: mod_base = OTHER; note = 2'-O-methylcytidine-3'-phosphate
  modified_base 19: mod_base = OTHER; note = 2'-O-methyladenosine-3'-phosphate
  modified_base 20: mod_base = OTHER; note = 2'-O-methylguanosine-3'-phosphate
  modified_base 21: mod_base = OTHER; note = 2'-O-methyladenosine-3'-phosphate
  modified_base 22: mod_base = OTHER; note = 2'-O-methylcytidine-3'-phosphate
  modified_base 23: mod_base = OTHER; note = 2'-O-methyladenosine
ttttcacctgttcccttcagaca

SEQ ID NO: 4831 - RNA, 23 nt, synthetic construct
  source 1..23: mol_type = other RNA
  modified_base 1: mod_base = OTHER; note = 2'-O-methyluridine-3'-phosphate 5'phosphate
  modified_base 2: mod_base = OTHER; note = 2'-deoxy-2'-fluorouridine-3'-phosphate
  modified_base 3: mod_base = OTHER; note = 2'-O-methyluridine-3'-phosphate
  modified_base 4: mod_base = OTHER; note = 2'-O-methyluridine-3'-phosphate
  modified_base 5: mod_base = OTHER; note = 2'-O-methyluridine-3'-phosphate
  modified_base 6: mod_base = OTHER; note = 2'-deoxy-2'-fluorocytidine-3'-phosphate
  modified_base 7: mod_base = OTHER; note = 2'-O-methyladenosine-3'-phosphate
  modified_base 8: mod_base = OTHER; note = 2'-O-methylcytidine-3'-phosphate
  modified_base 9: mod_base = OTHER; note = 2'-O-methylcytidine-3'-phosphate
  modified_base 10: mod_base = OTHER; note = 2'-O-methyluridine-3'-phosphate
  modified_base 11: mod_base = OTHER; note = 2'-O-methylguanosine-3'-phosphate
  modified_base 12: mod_base = OTHER; note = 2'-O-methyluridine-3'-phosphate
  modified_base 13: mod_base = OTHER; note = 2'-O-methyluridine-3'-phosphate
  modified_base 14: mod_base = OTHER; note = 2'-deoxy-2'-fluorocytidine-3'-phosphate
  modified_base 15: mod_base = OTHER; note = 2'-O-methylcytidine-3'-phosphate
  modified_base 16: mod_base = OTHER; note = 2'-deoxy-2'-fluorocytidine-3'-phosphate
  modified_base 17: mod_base = OTHER; note = 2'-O-methyluridine-3'-phosphate
  modified_base 18: mod_base = OTHER; note = 2'-O-methyluridine-3'-phosphate
  modified_base 19: mod_base = OTHER; note = 2'-O-methylcytidine-3'-phosphate
  modified_base 20: mod_base = OTHER; note = 2'-O-methyladenosine-3'-phosphate
  modified_base 21: mod_base = OTHER; note = 2'-O-methylguanosine-3'-phosphate
  modified_base 22: mod_base = OTHER; note = 2'-O-methyladenosine-3'-phosphate
  modified_base 23: mod_base = OTHER; note = 2'-O-methylcytidine
tttttcacctgttcccttcagac

SEQ ID NO: 4832 - RNA, 23 nt, synthetic construct
  source 1..23: mol_type = other RNA
  modified_base 1: mod_base = OTHER; note = 2'-O-methyluridine-3'-phosphate 5'phosphate
  modified_base 2: mod_base = OTHER; note = 2'-deoxy-2'-fluoroguanosine-3'-phosphate
  modified_base 3: mod_base = OTHER; note = 2'-O-methyluridine-3'-phosphate
  modified_base 4: mod_base = OTHER; note = 2'-O-methyluridine-3'-phosphate
  modified_base 5: mod_base = OTHER; note = 2'-O-methyluridine-3'-phosphate
  modified_base 6: mod_base = OTHER; note = 2'-deoxy-2'-fluorouridine-3'-phosphate
  modified_base 7: mod_base = OTHER; note = 2'-O-methylcytidine-3'-phosphate
  modified_base 8: mod_base = OTHER; note = 2'-O-methyladenosine-3'-phosphate
  modified_base 9: mod_base = OTHER; note = 2'-O-methylcytidine-3'-phosphate
  modified_base 10: mod_base = OTHER; note = 2'-O-methylcytidine-3'-phosphate
  modified_base 11: mod_base = OTHER; note = 2'-O-methyluridine-3'-phosphate
  modified_base 12: mod_base = OTHER; note = 2'-O-methylguanosine-3'-phosphate
  modified_base 13: mod_base = OTHER; note = 2'-O-methyluridine-3'-phosphate
  modified_base 14: mod_base = OTHER; note = 2'-deoxy-2'-fluorouridine-3'-phosphate
  modified_base 15: mod_base = OTHER; note = 2'-O-methylcytidine-3'-phosphate
  modified_base 16: mod_base = OTHER; note = 2'-deoxy-2'-fluorocytidine-3'-phosphate
  modified_base 17: mod_base = OTHER; note = 2'-O-methylcytidine-3'-phosphate
  modified_base 18: mod_base = OTHER; note = 2'-O-methyluridine-3'-phosphate
  modified_base 19: mod_base = OTHER; note = 2'-O-methyluridine-3'-phosphate
  modified_base 20: mod_base = OTHER; note = 2'-O-methylcytidine-3'-phosphate
  modified_base 21: mod_base = OTHER; note = 2'-O-methyladenosine-3'-phosphate
  modified_base 22: mod_base = OTHER; note = 2'-O-methylguanosine-3'-phosphate
  modified_base 23: mod_base = OTHER; note = 2'-O-methyladenosine
tgttttcacctgttcccttcaga

SEQ ID NO: 4833 - RNA, 23 nt, synthetic construct
  source 1..23: mol_type = other RNA
  modified_base 1: mod_base = OTHER; note = 2'-O-methyluridine-3'-phosphate 5'phosphate
  modified_base 2: mod_base = OTHER; note = 2'-deoxy-2'-fluoroadenosine-3'-phosphate
  modified_base 3: mod_base = OTHER; note = 2'-O-methylguanosine-3'-phosphate
  modified_base 4: mod_base = OTHER; note = 2'-O-methyluridine-3'-phosphate
  modified_base 5: mod_base = OTHER; note = 2'-O-methyluridine-3'-phosphate
  modified_base 6: mod_base = OTHER; note = 2'-deoxy-2'-fluorouridine-3'-phosphate
  modified_base 7: mod_base = OTHER; note = 2'-O-methyluridine-3'-phosphate
  modified_base 8: mod_base = OTHER; note = 2'-O-methylcytidine-3'-phosphate
  modified_base 9: mod_base = OTHER; note = 2'-O-methyladenosine-3'-phosphate
  modified_base 10: mod_base = OTHER; note = 2'-O-methylcytidine-3'-phosphate
  modified_base 11: mod_base = OTHER; note = 2'-O-methylcytidine-3'-phosphate
  modified_base 12: mod_base = OTHER; note = 2'-O-methyluridine-3'-phosphate
  modified_base 13: mod_base = OTHER; note = 2'-O-methylguanosine-3'-phosphate
  modified_base 14: mod_base = OTHER; note = 2'-deoxy-2'-fluorouridine-3'-phosphate
  modified_base 15: mod_base = OTHER; note = 2'-O-methyluridine-3'-phosphate
  modified_base 16: mod_base = OTHER; note = 2'-deoxy-2'-fluorocytidine-3'-phosphate
  modified_base 17: mod_base = OTHER; note = 2'-O-methylcytidine-3'-phosphate
  modified_base 18: mod_base = OTHER; note = 2'-O-methylcytidine-3'-phosphate
  modified_base 19: mod_base = OTHER; note = 2'-O-methyluridine-3'-phosphate
  modified_base 20: mod_base = OTHER; note = 2'-O-methyluridine-3'-phosphate
  modified_base 21: mod_base = OTHER; note = 2'-O-methylcytidine-3'-phosphate
  modified_base 22: mod_base = OTHER; note = 2'-O-methyladenosine-3'-phosphate
  modified_base 23: mod_base = OTHER; note = 2'-O-methylguanosine
tagttttcacctgttcccttcag

SEQ ID NO: 4834 - RNA, 23 nt, synthetic construct
  source 1..23: mol_type = other RNA
  modified_base 1: mod_base = OTHER; note = 2'-O-methyluridine-3'-phosphate 5'phosphate
  modified_base 2: mod_base = OTHER; note = 2'-deoxy-2'-fluorouridine-3'-phosphate
  modified_base 3: mod_base = OTHER; note = 2'-O-methyladenosine-3'-phosphate
  modified_base 4: mod_base = OTHER; note = 2'-O-methylguanosine-3'-phosphate
  modified_base 5: mod_base = OTHER; note = 2'-O-methyluridine-3'-phosphate
  modified_base 6: mod_base = OTHER; note = 2'-deoxy-2'-fluorouridine-3'-phosphate
  modified_base 7: mod_base = OTHER; note = 2'-O-methyluridine-3'-phosphate
  modified_base 8: mod_base = OTHER; note = 2'-O-methyluridine-3'-phosphate
  modified_base 9: mod_base = OTHER; note = 2'-O-methylcytidine-3'-phosphate
  modified_base 10: mod_base = OTHER; note = 2'-O-methyladenosine-3'-phosphate
  modified_base 11: mod_base = OTHER; note = 2'-O-methylcytidine-3'-phosphate
  modified_base 12: mod_base = OTHER; note = 2'-O-methylcytidine-3'-phosphate
  modified_base 13: mod_base = OTHER; note = 2'-O-methyluridine-3'-phosphate
  modified_base 14: mod_base = OTHER; note = 2'-deoxy-2'-fluoroguanosine-3'-phosphate
  modified_base 15: mod_base = OTHER; note = 2'-O-methyluridine-3'-phosphate
  modified_base 16: mod_base = OTHER; note = 2'-deoxy-2'-fluorouridine-3'-phosphate
  modified_base 17: mod_base = OTHER; note = 2'-O-methylcytidine-3'-phosphate
  modified_base 18: mod_base = OTHER; note = 2'-O-methylcytidine-3'-phosphate
  modified_base 19: mod_base = OTHER; note = 2'-O-methylcytidine-3'-phosphate
  modified_base 20: mod_base = OTHER; note = 2'-O-methyluridine-3'-phosphate
  modified_base 21: mod_base = OTHER; note = 2'-O-methyluridine-3'-phosphate
  modified_base 22: mod_base = OTHER; note = 2'-O-methylcytidine-3'-phosphate
  modified_base 23: mod_base = OTHER; note = 2'-O-methyladenosine
ttagttttcacctgttcccttca

SEQ ID NO: 4835 - RNA, 23 nt, synthetic construct
  source 1..23: mol_type = other RNA
  modified_base 1: mod_base = OTHER; note = 2'-O-methyluridine-3'-phosphate 5'phosphate
  modified_base 2: mod_base = OTHER; note = 2'-deoxy-2'-fluoroadenosine-3'-phosphate
  modified_base 3: mod_base = OTHER; note = 2'-O-methyluridine-3'-phosphate
  modified_base 4: mod_base = OTHER; note = 2'-O-methyladenosine-3'-phosphate
  modified_base 5: mod_base = OTHER; note = 2'-O-methylguanosine-3'-phosphate
  modified_base 6: mod_base = OTHER; note = 2'-deoxy-2'-fluorouridine-3'-phosphate
  modified_base 7: mod_base = OTHER; note = 2'-O-methyluridine-3'-phosphate
  modified_base 8: mod_base = OTHER; note = 2'-O-methyluridine-3'-phosphate
  modified_base 9: mod_base = OTHER; note = 2'-O-methyluridine-3'-phosphate
  modified_base 10: mod_base = OTHER; note = 2'-O-methylcytidine-3'-phosphate
  modified_base 11: mod_base = OTHER; note = 2'-O-methyladenosine-3'-phosphate
  modified_base 12: mod_base = OTHER; note = 2'-O-methylcytidine-3'-phosphate
  modified_base 13: mod_base = OTHER; note = 2'-O-methylcytidine-3'-phosphate
  modified_base 14: mod_base = OTHER; note = 2'-deoxy-2'-fluorouridine-3'-phosphate
  modified_base 15: mod_base = OTHER; note = 2'-O-methylguanosine-3'-phosphate
  modified_base 16: mod_base = OTHER; note = 2'-deoxy-2'-fluorouridine-3'-phosphate
  modified_base 17: mod_base = OTHER; note = 2'-O-methyluridine-3'-phosphate
  modified_base 18: mod_base = OTHER; note = 2'-O-methylcytidine-3'-phosphate
  modified_base 19: mod_base = OTHER; note = 2'-O-methylcytidine-3'-phosphate
  modified_base 20: mod_base = OTHER; note = 2'-O-methylcytidine-3'-phosphate
  modified_base 21: mod_base = OTHER; note = 2'-O-methyluridine-3'-phosphate
  modified_base 22: mod_base = OTHER; note = 2'-O-methyluridine-3'-phosphate
  modified_base 23: mod_base = OTHER; note = 2'-O-methylcytidine
tatagttttcacctgttcccttc

SEQ ID NO: 4836 - RNA, 23 nt, synthetic construct
  source 1..23: mol_type = other RNA
  modified_base 1: mod_base = OTHER; note = 2'-O-methyluridine-3'-phosphate 5'phosphate
  modified_base 2: mod_base = OTHER; note = 2'-deoxy-2'-fluoroguanosine-3'-phosphate
  modified_base 3: mod_base = OTHER; note = 2'-O-methyladenosine-3'-phosphate
  modified_base 4: mod_base = OTHER; note = 2'-O-methyluridine-3'-phosphate
  modified_base 5: mod_base = OTHER; note = 2'-O-methyladenosine-3'-phosphate
  modified_base 6: mod_base = OTHER; note = 2'-deoxy-2'-fluoroguanosine-3'-phosphate
  modified_base 7: mod_base = OTHER; note = 2'-O-methyluridine-3'-phosphate
  modified_base 8: mod_base = OTHER; note = 2'-O-methyluridine-3'-phosphate
  modified_base 9: mod_base = OTHER; note = 2'-O-methyluridine-3'-phosphate
  modified_base 10: mod_base = OTHER; note = 2'-O-methyluridine-3'-phosphate
  modified_base 11: mod_base = OTHER; note = 2'-O-methylcytidine-3'-phosphate
  modified_base 12: mod_base = OTHER; note = 2'-O-methyladenosine-3'-phosphate
  modified_base 13: mod_base = OTHER; note = 2'-O-methylcytidine-3'-phosphate
  modified_base 14: mod_base = OTHER; note = 2'-deoxy-2'-fluorocytidine-3'-phosphate
  modified_base 15: mod_base = OTHER; note = 2'-O-methyluridine-3'-phosphate
  modified_base 16: mod_base = OTHER; note = 2'-deoxy-2'-fluoroguanosine-3'-phosphate
  modified_base 17: mod_base = OTHER; note = 2'-O-methyluridine-3'-phosphate
  modified_base 18: mod_base = OTHER; note = 2'-O-methyluridine-3'-phosphate
  modified_base 19: mod_base = OTHER; note = 2'-O-methylcytidine-3'-phosphate
  modified_base 20: mod_base = OTHER; note = 2'-O-methylcytidine-3'-phosphate
  modified_base 21: mod_base = OTHER; note = 2'-O-methylcytidine-3'-phosphate
  modified_base 22: mod_base = OTHER; note = 2'-O-methyluridine-3'-phosphate
  modified_base 23: mod_base = OTHER; note = 2'-O-methyluridine
tgatagttttcacctgttccctt

SEQ ID NO: 4837 - RNA, 23 nt, synthetic construct
  source 1..23: mol_type = other RNA
  modified_base 1: mod_base = OTHER; note = 2'-O-methyluridine-3'-phosphate 5'phosphate
  modified_base 2: mod_base = OTHER; note = 2'-deoxy-2'-fluorocytidine-3'-phosphate
  modified_base 3: mod_base = OTHER; note = 2'-O-methylguanosine-3'-phosphate
  modified_base 4: mod_base = OTHER; note = 2'-O-methyladenosine-3'-phosphate
  modified_base 5: mod_base = OTHER; note = 2'-O-methyluridine-3'-phosphate
  modified_base 6: mod_base = OTHER; note = 2'-deoxy-2'-fluoroadenosine-3'-phosphate
  modified_base 7: mod_base = OTHER; note = 2'-O-methylguanosine-3'-phosphate
  modified_base 8: mod_base = OTHER; note = 2'-O-methyluridine-3'-phosphate
  modified_base 9: mod_base = OTHER; note = 2'-O-methyluridine-3'-phosphate
  modified_base 10: mod_base = OTHER; note = 2'-O-methyluridine-3'-phosphate
  modified_base 11: mod_base = OTHER; note = 2'-O-methyluridine-3'-phosphate
  modified_base 12: mod_base = OTHER; note = 2'-O-methylcytidine-3'-phosphate
  modified_base 13: mod_base = OTHER; note = 2'-O-methyladenosine-3'-phosphate
  modified_base 14: mod_base = OTHER; note = 2'-deoxy-2'-fluorocytidine-3'-phosphate
  modified_base 15: mod_base = OTHER; note = 2'-O-methylcytidine-3'-phosphate
  modified_base 16: mod_base = OTHER; note = 2'-deoxy-2'-fluorouridine-3'-phosphate
  modified_base 17: mod_base = OTHER; note = 2'-O-methylguanosine-3'-phosphate
  modified_base 18: mod_base = OTHER; note = 2'-O-methyluridine-3'-phosphate
  modified_base 19: mod_base = OTHER; note = 2'-O-methyluridine-3'-phosphate
  modified_base 20: mod_base = OTHER; note = 2'-O-methylcytidine-3'-phosphate
  modified_base 21: mod_base = OTHER; note = 2'-O-methylcytidine-3'-phosphate
  modified_base 22: mod_base = OTHER; note = 2'-O-methylcytidine-3'-phosphate
  modified_base 23: mod_base = OTHER; note = 2'-O-methyluridine
tcgatagttttcacctgttccct

SEQ ID NO: 4838 - RNA, 23 nt, synthetic construct
  source 1..23: mol_type = other RNA
  modified_base 1: mod_base = OTHER; note = 2'-O-methyluridine-3'-phosphate 5'phosphate
  modified_base 2: mod_base = OTHER; note = 2'-deoxy-2'-fluoroguanosine-3'-phosphate
  modified_base 3: mod_base = OTHER; note = 2'-O-methylcytidine-3'-phosphate
  modified_base 4: mod_base = OTHER; note = 2'-O-methylguanosine-3'-phosphate
  modified_base 5: mod_base = OTHER; note = 2'-O-methyladenosine-3'-phosphate
  modified_base 6: mod_base = OTHER; note = 2'-deoxy-2'-fluorouridine-3'-phosphate
  modified_base 7: mod_base = OTHER; note = 2'-O-methyladenosine-3'-phosphate
  modified_base 8: mod_base = OTHER; note = 2'-O-methylguanosine-3'-phosphate
  modified_base 9: mod_base = OTHER; note = 2'-O-methyluridine-3'-phosphate
  modified_base 10: mod_base = OTHER; note = 2'-O-methyluridine-3'-phosphate
  modified_base 11: mod_base = OTHER; note = 2'-O-methyluridine-3'-phosphate
  modified_base 12: mod_base = OTHER; note = 2'-O-methyluridine-3'-phosphate
  modified_base 13: mod_base = OTHER; note = 2'-O-methylcytidine-3'-phosphate
  modified_base 14: mod_base = OTHER; note = 2'-deoxy-2'-fluoroadenosine-3'-phosphate
  modified_base 15: mod_base = OTHER; note = 2'-O-methylcytidine-3'-phosphate
  modified_base 16: mod_base = OTHER; note = 2'-deoxy-2'-fluorocytidine-3'-phosphate
  modified_base 17: mod_base = OTHER; note = 2'-O-methyluridine-3'-phosphate
  modified_base 18: mod_base = OTHER; note = 2'-O-methylguanosine-3'-phosphate
  modified_base 19: mod_base = OTHER; note = 2'-O-methyluridine-3'-phosphate
  modified_base 20: mod_base = OTHER; note = 2'-O-methyluridine-3'-phosphate
  modified_base 21: mod_base = OTHER; note = 2'-O-methylcytidine-3'-phosphate
  modified_base 22: mod_base = OTHER; note = 2'-O-methylcytidine-3'-phosphate
  modified_base 23: mod_base = OTHER; note = 2'-O-methylcytidine
tgcgatagttttcacctgttccc

SEQ ID NO: 4839 - RNA, 23 nt, synthetic construct
  source 1..23: mol_type = other RNA
  modified_base 1: mod_base = OTHER; note = 2'-O-methyluridine-3'-phosphate 5'phosphate
  modified_base 2: mod_base = OTHER; note = 2'-deoxy-2'-fluoroadenosine-3'-phosphate
  modified_base 3: mod_base = OTHER; note = 2'-O-methyluridine-3'-phosphate
  modified_base 4: mod_base = OTHER; note = 2'-O-methyluridine-3'-phosphate
  modified_base 5: mod_base = OTHER; note = 2'-O-methylcytidine-3'-phosphate
  modified_base 6: mod_base = OTHER; note = 2'-deoxy-2'-fluorocytidine-3'-phosphate
  modified_base 7: mod_base = OTHER; note = 2'-O-methylcytidine-3'-phosphate
  modified_base 8: mod_base = OTHER; note = 2'-O-methylguanosine-3'-phosphate
  modified_base 9: mod_base = OTHER; note = 2'-O-methylcytidine-3'-phosphate
  modified_base 10: mod_base = OTHER; note = 2'-O-methylguanosine-3'-phosphate
  modified_base 11: mod_base = OTHER; note = 2'-O-methyladenosine-3'-phosphate
  modified_base 12: mod_base = OTHER; note = 2'-O-methyluridine-3'-phosphate
  modified_base 13: mod_base = OTHER; note = 2'-O-methyladenosine-3'-phosphate
  modified_base 14: mod_base = OTHER; note = 2'-deoxy-2'-fluoroguanosine-3'-phosphate
  modified_base 15: mod_base = OTHER; note = 2'-O-methyluridine-3'-phosphate
  modified_base 16: mod_base = OTHER; note = 2'-deoxy-2'-fluorouridine-3'-phosphate
  modified_base 17: mod_base = OTHER; note = 2'-O-methyluridine-3'-phosphate
  modified_base 18: mod_base = OTHER; note = 2'-O-methyluridine-3'-phosphate
  modified_base 19: mod_base = OTHER; note = 2'-O-methylcytidine-3'-phosphate
  modified_base 20: mod_base = OTHER; note = 2'-O-methyladenosine-3'-phosphate
  modified_base 21: mod_base = OTHER; note = 2'-O-methylcytidine-3'-phosphate
  modified_base 22: mod_base = OTHER; note = 2'-O-methylcytidine-3'-phosphate
  modified_base 23: mod_base = OTHER; note = 2'-O-methyluridine
tattcccgcgatagttttcacct

SEQ ID NO: 4840 - RNA, 23 nt, synthetic construct
  source 1..23: mol_type = other RNA
  modified_base 1: mod_base = OTHER; note = 2'-O-methyluridine-3'-phosphate 5'phosphate
  modified_base 2: mod_base = OTHER; note = 2'-deoxy-2'-fluoroadenosine-3'-phosphate
  modified_base 3: mod_base = OTHER; note = 2'-O-methylcytidine-3'-phosphate
  modified_base 4: mod_base = OTHER; note = 2'-O-methyladenosine-3'-phosphate
  modified_base 5: mod_base = OTHER; note = 2'-O-methyluridine-3'-phosphate
  modified_base 6: mod_base = OTHER; note = 2'-deoxy-2'-fluorouridine-3'-phosphate
  modified_base 7: mod_base = OTHER; note = 2'-O-methylcytidine-3'-phosphate
  modified_base 8: mod_base = OTHER; note = 2'-O-methylcytidine-3'-phosphate
  modified_base 9: mod_base = OTHER; note = 2'-O-methylcytidine-3'-phosphate
  modified_base 10: mod_base = OTHER; note = 2'-O-methylguanosine-3'-phosphate
  modified_base 11: mod_base = OTHER; note = 2'-O-methylcytidine-3'-phosphate
  modified_base 12: mod_base = OTHER; note = 2'-O-methylguanosine-3'-phosphate
  modified_base 13: mod_base = OTHER; note = 2'-O-methyladenosine-3'-phosphate
  modified_base 14: mod_base = OTHER; note = 2'-deoxy-2'-fluorouridine-3'-phosphate
  modified_base 15: mod_base = OTHER; note = 2'-O-methyladenosine-3'-phosphate
  modified_base 16: mod_base = OTHER; note = 2'-deoxy-2'-fluoroguanosine-3'-phosphate
  modified_base 17: mod_base = OTHER; note = 2'-O-methyluridine-3'-phosphate
  modified_base 18: mod_base = OTHER; note = 2'-O-methyluridine-3'-phosphate
  modified_base 19: mod_base = OTHER; note = 2'-O-methyluridine-3'-phosphate
  modified_base 20: mod_base = OTHER; note = 2'-O-methyluridine-3'-phosphate
  modified_base 21: mod_base = OTHER; note = 2'-O-methylcytidine-3'-phosphate
  modified_base 22: mod_base = OTHER; note = 2'-O-methyladenosine-3'-phosphate
  modified_base 23: mod_base = OTHER; note = 2'-O-methylcytidine
tacattcccgcgatagttttcac

SEQ ID NO: 4841 - RNA, 23 nt, synthetic construct
  source 1..23: mol_type = other RNA
  modified_base 1: mod_base = OTHER; note = 2'-O-methyluridine-3'-phosphate 5'phosphate
  modified_base 2: mod_base = OTHER; note = 2'-deoxy-2'-fluorocytidine-3'-phosphate
  modified_base 3: mod_base = OTHER; note = 2'-O-methyladenosine-3'-phosphate
  modified_base 4: mod_base = OTHER; note = 2'-O-methylcytidine-3'-phosphate
  modified_base 5: mod_base = OTHER; note = 2'-O-methyladenosine-3'-phosphate
  modified_base 6: mod_base = OTHER; note = 2'-deoxy-2'-fluorouridine-3'-phosphate
  modified_base 7: mod_base = OTHER; note = 2'-O-methyluridine-3'-phosphate
  modified_base 8: mod_base = OTHER; note = 2'-O-methylcytidine-3'-phosphate
  modified_base 9: mod_base = OTHER; note = 2'-O-methylcytidine-3'-phosphate
  modified_base 10: mod_base = OTHER; note = 2'-O-methylcytidine-3'-phosphate
  modified_base 11: mod_base = OTHER; note = 2'-O-methylguanosine-3'-phosphate
  modified_base 12: mod_base = OTHER; note = 2'-O-methylcytidine-3'-phosphate
  modified_base 13: mod_base = OTHER; note = 2'-O-methylguanosine-3'-phosphate
  modified_base 14: mod_base = OTHER; note = 2'-deoxy-2'-fluoroadenosine-3'-phosphate
  modified_base 15: mod_base = OTHER; note = 2'-O-methyluridine-3'-phosphate
  modified_base 16: mod_base = OTHER; note = 2'-deoxy-2'-fluoroadenosine-3'-phosphate
  modified_base 17: mod_base = OTHER; note = 2'-O-methylguanosine-3'-phosphate
  modified_base 18: mod_base = OTHER; note = 2'-O-methyluridine-3'-phosphate
  modified_base 19: mod_base = OTHER; note = 2'-O-methyluridine-3'-phosphate
  modified_base 20: mod_base = OTHER; note = 2'-O-methyluridine-3'-phosphate
  modified_base 21: mod_base = OTHER; note = 2'-O-methyluridine-3'-phosphate
  modified_base 22: mod_base = OTHER; note = 2'-O-methylcytidine-3'-phosphate
  modified_base 23: mod_base = OTHER; note = 2'-O-methyladenosine
tcacattcccgcgatagttttca

SEQ ID NO: 4842 - RNA, 23 nt, synthetic construct
  source 1..23: mol_type = other RNA
  modified_base 1: mod_base = OTHER; note = 2'-O-methyluridine-3'-phosphate 5'phosphate
  modified_base 2: mod_base = OTHER; note = 2'-deoxy-2'-fluoroadenosine-3'-phosphate
  modified_base 3: mod_base = OTHER; note = 2'-O-methylcytidine-3'-phosphate
  modified_base 4: mod_base = OTHER; note = 2'-O-methyladenosine-3'-phosphate
  modified_base 5: mod_base = OTHER; note = 2'-O-methylguanosine-3'-phosphate
  modified_base 6: mod_base = OTHER; note = 2'-deoxy-2'-fluorocytidine-3'-phosphate
  modified_base 7: mod_base = OTHER; note = 2'-O-methylcytidine-3'-phosphate
  modified_base 8: mod_base = OTHER; note = 2'-O-methyladenosine-3'-phosphate
  modified_base 9: mod_base = OTHER; note = 2'-O-methylcytidine-3'-phosphate
  modified_base 10: mod_base = OTHER; note = 2'-O-methyladenosine-3'-phosphate
  modified_base 11: mod_base = OTHER; note = 2'-O-methyluridine-3'-phosphate
  modified_base 12: mod_base = OTHER; note = 2'-O-methyluridine-3'-phosphate
  modified_base 13: mod_base = OTHER; note = 2'-O-methylcytidine-3'-phosphate
  modified_base 14: mod_base = OTHER; note = 2'-deoxy-2'-fluorocytidine-3'-phosphate
  modified_base 15: mod_base = OTHER; note = 2'-O-methylcytidine-3'-phosphate
  modified_base 16: mod_base = OTHER; note = 2'-deoxy-2'-fluoroguanosine-3'-phosphate
  modified_base 17: mod_base = OTHER; note = 2'-O-methylcytidine-3'-phosphate
  modified_base 18: mod_base = OTHER; note = 2'-O-methylguanosine-3'-phosphate
  modified_base 19: mod_base = OTHER; note = 2'-O-methyladenosine-3'-phosphate
  modified_base 20: mod_base = OTHER; note = 2'-O-methyluridine-3'-phosphate
  modified_base 21: mod_base = OTHER; note = 2'-O-methyladenosine-3'-phosphate
  modified_base 22: mod_base = OTHER; note = 2'-O-methylguanosine-3'-phosphate
  modified_base 23: mod_base = OTHER; note = 2'-O-methyluridine
tacagccacattcccgcgatagt

SEQ ID NO: 4843 - RNA, 23 nt, synthetic construct
  source 1..23: mol_type = other RNA
  modified_base 1: mod_base = OTHER; note = 2'-O-methyluridine-3'-phosphate 5'phosphate
  modified_base 2: mod_base = OTHER; note = 2'-deoxy-2'-fluoroadenosine-3'-phosphate
  modified_base 3: mod_base = OTHER; note = 2'-O-methyladenosine-3'-phosphate
  modified_base 4: mod_base = OTHER; note = 2'-O-methylcytidine-3'-phosphate
  modified_base 5: mod_base = OTHER; note = 2'-O-methyladenosine-3'-phosphate
  modified_base 6: mod_base = OTHER; note = 2'-deoxy-2'-fluoroguanosine-3'-phosphate
  modified_base 7: mod_base = OTHER; note = 2'-O-methylcytidine-3'-phosphate
  modified_base 8: mod_base = OTHER; note = 2'-O-methylcytidine-3'-phosphate
  modified_base 9: mod_base = OTHER; note = 2'-O-methyladenosine-3'-phosphate
  modified_base 10: mod_base = OTHER; note = 2'-O-methylcytidine-3'-phosphate
  modified_base 11: mod_base = OTHER; note = 2'-O-methyladenosine-3'-phosphate
  modified_base 12: mod_base = OTHER; note = 2'-O-methyluridine-3'-phosphate
  modified_base 13: mod_base = OTHER; note = 2'-O-methyluridine-3'-phosphate
  modified_base 14: mod_base = OTHER; note = 2'-deoxy-2'-fluorocytidine-3'-phosphate
  modified_base 15: mod_base = OTHER; note = 2'-O-methylcytidine-3'-phosphate
  modified_base 16: mod_base = OTHER; note = 2'-deoxy-2'-fluorocytidine-3'-phosphate
  modified_base 17: mod_base = OTHER; note = 2'-O-methylguanosine-3'-phosphate
  modified_base 18: mod_base = OTHER; note = 2'-O-methylcytidine-3'-phosphate
  modified_base 19: mod_base = OTHER; note = 2'-O-methylguanosine-3'-phosphate
  modified_base 20: mod_base = OTHER; note = 2'-O-methyladenosine-3'-phosphate
  modified_base 21: mod_base = OTHER; note = 2'-O-methyluridine-3'-phosphate
  modified_base 22: mod_base = OTHER; note = 2'-O-methyladenosine-3'-phosphate
  modified_base 23: mod_base = OTHER; note = 2'-O-methylguanosine
taacagccacattcccgcgatag

SEQ ID NO: 4844 - RNA, 23 nt, synthetic construct
  source 1..23: mol_type = other RNA
  modified_base 1: mod_base = OTHER; note = 2'-O-methyluridine-3'-phosphate 5'phosphate
  modified_base 2: mod_base = OTHER; note = 2'-deoxy-2'-fluorouridine-3'-phosphate
  modified_base 3: mod_base = OTHER; note = 2'-O-methyladenosine-3'-phosphate
  modified_base 4: mod_base = OTHER; note = 2'-O-methyladenosine-3'-phosphate
  modified_base 5: mod_base = OTHER; note = 2'-O-methylcytidine-3'-phosphate
  modified_base 6: mod_base = OTHER; note = 2'-deoxy-2'-fluoroadenosine-3'-phosphate
  modified_base 7: mod_base = OTHER; note = 2'-O-methylguanosine-3'-phosphate
  modified_base 8: mod_base = OTHER; note = 2'-O-methylcytidine-3'-phosphate
  modified_base 9: mod_base = OTHER; note = 2'-O-methylcytidine-3'-phosphate
  modified_base 10: mod_base = OTHER; note = 2'-O-methyladenosine-3'-phosphate
  modified_base 11: mod_base = OTHER; note = 2'-O-methylcytidine-3'-phosphate
  modified_base 12: mod_base = OTHER; note = 2'-O-methyladenosine-3'-phosphate
  modified_base 13: mod_base = OTHER; note = 2'-O-methyluridine-3'-phosphate
  modified_base 14: mod_base = OTHER; note = 2'-deoxy-2'-fluorouridine-3'-phosphate
  modified_base 15: mod_base = OTHER; note = 2'-O-methylcytidine-3'-phosphate
  modified_base 16: mod_base = OTHER; note = 2'-deoxy-2'-fluorocytidine-3'-phosphate
  modified_base 17: mod_base = OTHER; note = 2'-O-methylcytidine-3'-phosphate
  modified_base 18: mod_base = OTHER; note = 2'-O-methylguanosine-3'-phosphate
  modified_base 19: mod_base = OTHER; note = 2'-O-methylcytidine-3'-phosphate
  modified_base 20: mod_base = OTHER; note = 2'-O-methylguanosine-3'-phosphate
  modified_base 21: mod_base = OTHER; note = 2'-O-methyladenosine-3'-phosphate
  modified_base 22: mod_base = OTHER; note = 2'-O-methyluridine-3'-phosphate
  modified_base 23: mod_base = OTHER; note = 2'-O-methyladenosine
ttaacagccacattcccgcgata

SEQ ID NO: 4845 - RNA, 23 nt, synthetic construct
  source 1..23: mol_type = other RNA
  modified_base 1: mod_base = OTHER; note = 2'-O-methyluridine-3'-phosphate 5'phosphate
  modified_base 2: mod_base = OTHER; note = 2'-deoxy-2'-fluoroguanosine-3'-phosphate
  modified_base 3: mod_base = OTHER; note = 2'-O-methyluridine-3'-phosphate
  modified_base 4: mod_base = OTHER; note = 2'-O-methyladenosine-3'-phosphate
  modified_base 5: mod_base = OTHER; note = 2'-O-methyladenosine-3'-phosphate
  modified_base 6: mod_base = OTHER; note = 2'-deoxy-2'-fluorocytidine-3'-phosphate
  modified_base 7: mod_base = OTHER; note = 2'-O-methyladenosine-3'-phosphate
  modified_base 8: mod_base = OTHER; note = 2'-O-methylguanosine-3'-phosphate
  modified_base 9: mod_base = OTHER; note = 2'-O-methylcytidine-3'-phosphate
  modified_base 10: mod_base = OTHER; note = 2'-O-methylcytidine-3'-phosphate
  modified_base 11: mod_base = OTHER; note = 2'-O-methyladenosine-3'-phosphate
  modified_base 12: mod_base = OTHER; note = 2'-O-methylcytidine-3'-phosphate
  modified_base 13: mod_base = OTHER; note = 2'-O-methyladenosine-3'-phosphate
  modified_base 14: mod_base = OTHER; note = 2'-deoxy-2'-fluorouridine-3'-phosphate
  modified_base 15: mod_base = OTHER; note = 2'-O-methyluridine-3'-phosphate
  modified_base 16: mod_base = OTHER; note = 2'-deoxy-2'-fluorocytidine-3'-phosphate
  modified_base 17: mod_base = OTHER; note = 2'-O-methylcytidine-3'-phosphate
  modified_base 18: mod_base = OTHER; note = 2'-O-methylcytidine-3'-phosphate
  modified_base 19: mod_base = OTHER; note = 2'-O-methylguanosine-3'-phosphate
  modified_base 20: mod_base = OTHER; note = 2'-O-methylcytidine-3'-phosphate
  modified_base 21: mod_base = OTHER; note = 2'-O-methylguanosine-3'-phosphate
  modified_base 22: mod_base = OTHER; note = 2'-O-methyladenosine-3'-phosphate
  modified_base 23: mod_base = OTHER; note = 2'-O-methyluridine
tgtaacagccacattcccgcgat

SEQ ID NO: 4846 - RNA, 23 nt, synthetic construct
  source 1..23: mol_type = other RNA
  modified_base 1: mod_base = OTHER; note = 2'-O-methyluridine-3'-phosphate 5'phosphate
  modified_base 2: mod_base = OTHER; note = 2'-deoxy-2'-fluoroadenosine-3'-phosphate
  modified_base 3: mod_base = OTHER; note = 2'-O-methylcytidine-3'-phosphate
  modified_base 4: mod_base = OTHER; note = 2'-O-methylguanosine-3'-phosphate
  modified_base 5: mod_base = OTHER; note = 2'-O-methylguanosine-3'-phosphate
  modified_base 6: mod_base = OTHER; note = 2'-deoxy-2'-fluorouridine-3'-phosphate
  modified_base 7: mod_base = OTHER; note = 2'-O-methyladenosine-3'-phosphate
  modified_base 8: mod_base = OTHER; note = 2'-O-methyladenosine-3'-phosphate
  modified_base 9: mod_base = OTHER; note = 2'-O-methylcytidine-3'-phosphate
  modified_base 10: mod_base = OTHER; note = 2'-O-methyladenosine-3'-phosphate
  modified_base 11: mod_base = OTHER; note = 2'-O-methylguanosine-3'-phosphate
  modified_base 12: mod_base = OTHER; note = 2'-O-methylcytidine-3'-phosphate
  modified_base 13: mod_base = OTHER; note = 2'-O-methylcytidine-3'-phosphate
  modified_base 14: mod_base = OTHER; note = 2'-deoxy-2'-fluoroadenosine-3'-phosphate
  modified_base 15: mod_base = OTHER; note = 2'-O-methylcytidine-3'-phosphate
  modified_base 16: mod_base = OTHER; note = 2'-deoxy-2'-fluoroadenosine-3'-phosphate
  modified_base 17: mod_base = OTHER; note = 2'-O-methyluridine-3'-phosphate
  modified_base 18: mod_base = OTHER; note = 2'-O-methyluridine-3'-phosphate
  modified_base 19: mod_base = OTHER; note = 2'-O-methylcytidine-3'-phosphate
  modified_base 20: mod_base = OTHER; note = 2'-O-methylcytidine-3'-phosphate
  modified_base 21: mod_base = OTHER; note = 2'-O-methylcytidine-3'-phosphate
  modified_base 22: mod_base = OTHER; note = 2'-O-methylguanosine-3'-phosphate
  modified_base 23: mod_base = OTHER; note = 2'-O-methylcytidine
tacggtaacagccacattcccgc

SEQ ID NO: 4847 - RNA, 23 nt, synthetic construct
  source 1..23: mol_type = other RNA
  modified_base 1: mod_base = OTHER; note = 2'-O-methyluridine-3'-phosphate 5'phosphate
  modified_base 2: mod_base = OTHER; note = 2'-deoxy-2'-fluoroadenosine-3'-phosphate
  modified_base 3: mod_base = OTHER; note = 2'-O-methylcytidine-3'-phosphate
  modified_base 4: mod_base = OTHER; note = 2'-O-methyladenosine-3'-phosphate
  modified_base 5: mod_base = OTHER; note = 2'-O-methylcytidine-3'-phosphate
  modified_base 6: mod_base = OTHER; note = 2'-deoxy-2'-fluoroguanosine-3'-phosphate
  modified_base 7: mod_base = OTHER; note = 2'-O-methylguanosine-3'-phosphate
  modified_base 8: mod_base = OTHER; note = 2'-O-methyluridine-3'-phosphate
  modified_base 9: mod_base = OTHER; note = 2'-O-methyladenosine-3'-phosphate
  modified_base 10: mod_base = OTHER; note = 2'-O-methyladenosine-3'-phosphate
  modified_base 11: mod_base = OTHER; note = 2'-O-methylcytidine-3'-phosphate
  modified_base 12: mod_base = OTHER; note = 2'-O-methyladenosine-3'-phosphate
  modified_base 13: mod_base = OTHER; note = 2'-O-methylguanosine-3'-phosphate
  modified_base 14: mod_base = OTHER; note = 2'-deoxy-2'-fluorocytidine-3'-phosphate
  modified_base 15: mod_base = OTHER; note = 2'-O-methylcytidine-3'-phosphate
  modified_base 16: mod_base = OTHER; note = 2'-deoxy-2'-fluoroadenosine-3'-phosphate
  modified_base 17: mod_base = OTHER; note = 2'-O-methylcytidine-3'-phosphate
  modified_base 18: mod_base = OTHER; note = 2'-O-methyladenosine-3'-phosphate
  modified_base 19: mod_base = OTHER; note = 2'-O-methyluridine-3'-phosphate
  modified_base 20: mod_base = OTHER; note = 2'-O-methyluridine-3'-phosphate
  modified_base 21: mod_base = OTHER; note = 2'-O-methylcytidine-3'-phosphate
  modified_base 22: mod_base = OTHER; note = 2'-O-methylcytidine-3'-phosphate
  modified_base 23: mod_base = OTHER; note = 2'-O-methylcytidine
tacacggtaacagccacattccc

SEQ ID NO: 4848 - RNA, 23 nt, synthetic construct
  source 1..23: mol_type = other RNA
  modified_base 1: mod_base = OTHER; note = 2'-O-methyluridine-3'-phosphate 5'phosphate
  modified_base 2: mod_base = OTHER; note = 2'-deoxy-2'-fluoroguanosine-3'-phosphate
  modified_base 3: mod_base = OTHER; note = 2'-O-methyladenosine-3'-phosphate
  modified_base 4: mod_base = OTHER; note = 2'-O-methylcytidine-3'-phosphate
  modified_base 5: mod_base = OTHER; note = 2'-O-methyladenosine-3'-phosphate
  modified_base 6: mod_base = OTHER; note = 2'-deoxy-2'-fluorocytidine-3'-phosphate
  modified_base 7: mod_base = OTHER; note = 2'-O-methylguanosine-3'-phosphate
  modified_base 8: mod_base = OTHER; note = 2'-O-methylguanosine-3'-phosphate
  modified_base 9: mod_base = OTHER; note = 2'-O-methyluridine-3'-phosphate
  modified_base 10: mod_base = OTHER; note = 2'-O-methyladenosine-3'-phosphate
  modified_base 11: mod_base = OTHER; note = 2'-O-methyladenosine-3'-phosphate
  modified_base 12: mod_base = OTHER; note = 2'-O-methylcytidine-3'-phosphate
  modified_base 13: mod_base = OTHER; note = 2'-O-methyladenosine-3'-phosphate
  modified_base 14: mod_base = OTHER; note = 2'-deoxy-2'-fluoroguanosine-3'-phosphate
  modified_base 15: mod_base = OTHER; note = 2'-O-methylcytidine-3'-phosphate
  modified_base 16: mod_base = OTHER; note = 2'-deoxy-2'-fluorocytidine-3'-phosphate
  modified_base 17: mod_base = OTHER; note = 2'-O-methyladenosine-3'-phosphate
  modified_base 18: mod_base = OTHER; note = 2'-O-methylcytidine-3'-phosphate
  modified_base 19: mod_base = OTHER; note = 2'-O-methyladenosine-3'-phosphate
  modified_base 20: mod_base = OTHER; note = 2'-O-methyluridine-3'-phosphate
  modified_base 21: mod_base = OTHER; note = 2'-O-methyluridine-3'-phosphate
  modified_base 22: mod_base = OTHER; note = 2'-O-methylcytidine-3'-phosphate
  modified_base 23: mod_base = OTHER; note = 2'-O-methylcytidine
tgacacggtaacagccacattcc

SEQ ID NO: 4849 - RNA, 23 nt, synthetic construct
  source 1..23: mol_type = other RNA
  modified_base 1: mod_base = OTHER; note = 2'-O-methyluridine-3'-phosphate 5'phosphate
  modified_base 2: mod_base = OTHER; note = 2'-deoxy-2'-fluoroadenosine-3'-phosphate
  modified_base 3: mod_base = OTHER; note = 2'-O-methylcytidine-3'-phosphate
  modified_base 4: mod_base = OTHER; note = 2'-O-methyladenosine-3'-phosphate
  modified_base 5: mod_base = OTHER; note = 2'-O-methylguanosine-3'-phosphate
  modified_base 6: mod_base = OTHER; note = 2'-deoxy-2'-fluoroguanosine-3'-phosphate
  modified_base 7: mod_base = OTHER; note = 2'-O-methyluridine-3'-phosphate
  modified_base 8: mod_base = OTHER; note = 2'-O-methylguanosine-3'-phosphate
  modified_base 9: mod_base = OTHER; note = 2'-O-methyluridine-3'-phosphate
  modified_base 10: mod_base = OTHER; note = 2'-O-methylguanosine-3'-phosphate
  modified_base 11: mod_base = OTHER; note = 2'-O-methylcytidine-3'-phosphate
  modified_base 12: mod_base = OTHER; note = 2'-O-methylcytidine-3'-phosphate
  modified_base 13: mod_base = OTHER; note = 2'-O-methylcytidine-3'-phosphate
  modified_base 14: mod_base = OTHER; note = 2'-deoxy-2'-fluoroguanosine-3'-phosphate
  modified_base 15: mod_base = OTHER; note = 2'-O-methylguanosine-3'-phosphate
  modified_base 16: mod_base = OTHER; note = 2'-deoxy-2'-fluoroadenosine-3'-phosphate
  modified_base 17: mod_base = OTHER; note = 2'-O-methylcytidine-3'-phosphate
  modified_base 18: mod_base = OTHER; note = 2'-O-methyladenosine-3'-phosphate
  modified_base 19: mod_base = OTHER; note = 2'-O-methylcytidine-3'-phosphate
  modified_base 20: mod_base = OTHER; note = 2'-O-methylguanosine-3'-phosphate
  modified_base 21: mod_base = OTHER; note = 2'-O-methylguanosine-3'-phosphate
  modified_base 22: mod_base = OTHER; note = 2'-O-methyluridine-3'-phosphate
  modified_base 23: mod_base = OTHER; note = 2'-O-methyladenosine
tacaggtgtgcccggacacggta

SEQ ID NO: 4850 - RNA, 23 nt, synthetic construct
  source 1..23: mol_type = other RNA
  modified_base 1: mod_base = OTHER; note = 2'-O-methyluridine-3'-phosphate 5'phosphate
  modified_base 2: mod_base = OTHER; note = 2'-deoxy-2'-fluorouridine-3'-phosphate
  modified_base 3: mod_base = OTHER; note = 2'-O-methylguanosine-3'-phosphate
  modified_base 4: mod_base = OTHER; note = 2'-O-methylcytidine-3'-phosphate
  modified_base 5: mod_base = OTHER; note = 2'-O-methyluridine-3'-phosphate
  modified_base 6: mod_base = OTHER; note = 2'-deoxy-2'-fluoroguanosine-3'-phosphate
  modified_base 7: mod_base = OTHER; note = 2'-O-methyladenosine-3'-phosphate
  modified_base 8: mod_base = OTHER; note = 2'-O-methylcytidine-3'-phosphate
  modified_base 9: mod_base = OTHER; note = 2'-O-methyladenosine-3'-phosphate
  modified_base 10: mod_base = OTHER; note = 2'-O-methylguanosine-3'-phosphate
  modified_base 11: mod_base = OTHER; note = 2'-O-methylguanosine-3'-phosphate
  modified_base 12: mod_base = OTHER; note = 2'-O-methyluridine-3'-phosphate
  modified_base 13: mod_base = OTHER; note = 2'-O-methylguanosine-3'-phosphate
  modified_base 14: mod_base = OTHER; note = 2'-deoxy-2'-fluorouridine-3'-phosphate
  modified_base 15: mod_base = OTHER; note = 2'-O-methylguanosine-3'-phosphate
  modified_base 16: mod_base = OTHER; note = 2'-deoxy-2'-fluorocytidine-3'-phosphate
  modified_base 17: mod_base = OTHER; note = 2'-O-methylcytidine-3'-phosphate
  modified_base 18: mod_base = OTHER; note = 2'-O-methylcytidine-3'-phosphate
  modified_base 19: mod_base = OTHER; note = 2'-O-methylguanosine-3'-phosphate
  modified_base 20: mod_base = OTHER; note = 2'-O-methylguanosine-3'-phosphate
  modified_base 21: mod_base = OTHER; note = 2'-O-methyladenosine-3'-phosphate
  modified_base 22: mod_base = OTHER; note = 2'-O-methylcytidine-3'-phosphate
  modified_base 23: mod_base = OTHER; note = 2'-O-methyladenosine
ttgctgacaggtgtgcccggaca

SEQ ID NO: 4851 - RNA, 23 nt, synthetic construct
  source 1..23: mol_type = other RNA
  modified_base 1: mod_base = OTHER; note = 2'-O-methyluridine-3'-phosphate 5'phosphate
  modified_base 2: mod_base = OTHER; note = 2'-deoxy-2'-fluoroadenosine-3'-phosphate
  modified_base 3: mod_base = OTHER; note = 2'-O-methylguanosine-3'-phosphate
  modified_base 4: mod_base = OTHER; note = 2'-O-methyluridine-3'-phosphate
  modified_base 5: mod_base = OTHER; note = 2'-O-methylguanosine-3'-phosphate
  modified_base 6: mod_base = OTHER; note = 2'-deoxy-2'-fluorocytidine-3'-phosphate
  modified_base 7: mod_base = OTHER; note = 2'-O-methyluridine-3'-phosphate
  modified_base 8: mod_base = OTHER; note = 2'-O-methylguanosine-3'-phosphate
  modified_base 9: mod_base = OTHER; note = 2'-O-methyladenosine-3'-phosphate
  modified_base 10: mod_base = OTHER; note = 2'-O-methylcytidine-3'-phosphate
  modified_base 11: mod_base = OTHER; note = 2'-O-methyladenosine-3'-phosphate
  modified_base 12: mod_base = OTHER; note = 2'-O-methylguanosine-3'-phosphate
  modified_base 13: mod_base = OTHER; note = 2'-O-methylguanosine-3'-phosphate
  modified_base 14: mod_base = OTHER; note = 2'-deoxy-2'-fluorouridine-3'-phosphate
  modified_base 15: mod_base = OTHER; note = 2'-O-methylguanosine-3'-phosphate
  modified_base 16: mod_base = OTHER; note = 2'-deoxy-2'-fluorouridine-3'-phosphate
  modified_base 17: mod_base = OTHER; note = 2'-O-methylguanosine-3'-phosphate
  modified_base 18: mod_base = OTHER; note = 2'-O-methylcytidine-3'-phosphate
  modified_base 19: mod_base = OTHER; note = 2'-O-methylcytidine-3'-phosphate
  modified_base 20: mod_base = OTHER; note = 2'-O-methylcytidine-3'-phosphate
  modified_base 21: mod_base = OTHER; note = 2'-O-methylguanosine-3'-phosphate
  modified_base 22: mod_base = OTHER; note = 2'-O-methylguanosine-3'-phosphate
  modified_base 23: mod_base = OTHER; note = 2'-O-methyladenosine
tagtgctgacaggtgtgcccgga

SEQ ID NO: 4852 - RNA, 23 nt, synthetic construct
  source 1..23: mol_type = other RNA
  modified_base 1: mod_base = OTHER; note = 2'-O-methyluridine-3'-phosphate 5'phosphate
  modified_base 2: mod_base = OTHER; note = 2'-deoxy-2'-fluorouridine-3'-phosphate
  modified_base 3: mod_base = OTHER; note = 2'-O-methylcytidine-3'-phosphate
  modified_base 4: mod_base = OTHER; note = 2'-O-methylcytidine-3'-phosphate
  modified_base 5: mod_base = OTHER; note = 2'-O-methyladenosine-3'-phosphate
  modified_base 6: mod_base = OTHER; note = 2'-deoxy-2'-fluoroguanosine-3'-phosphate
  modified_base 7: mod_base = OTHER; note = 2'-O-methyluridine-3'-phosphate
  modified_base 8: mod_base = OTHER; note = 2'-O-methylguanosine-3'-phosphate
  modified_base 9: mod_base = OTHER; note = 2'-O-methylcytidine-3'-phosphate
  modified_base 10: mod_base = OTHER; note = 2'-O-methyluridine-3'-phosphate
  modified_base 11: mod_base = OTHER; note = 2'-O-methylguanosine-3'-phosphate
  modified_base 12: mod_base = OTHER; note = 2'-O-methyladenosine-3'-phosphate
  modified_base 13: mod_base = OTHER; note = 2'-O-methylcytidine-3'-phosphate
  modified_base 14: mod_base = OTHER; note = 2'-deoxy-2'-fluoroadenosine-3'-phosphate
  modified_base 15: mod_base = OTHER; note = 2'-O-methylguanosine-3'-phosphate
  modified_base 16: mod_base = OTHER; note = 2'-deoxy-2'-fluoroguanosine-3'-phosphate
  modified_base 17: mod_base = OTHER; note = 2'-O-methyluridine-3'-phosphate
  modified_base 18: mod_base = OTHER; note = 2'-O-methylguanosine-3'-phosphate
  modified_base 19: mod_base = OTHER; note = 2'-O-methyluridine-3'-phosphate
  modified_base 20: mod_base = OTHER; note = 2'-O-methylguanosine-3'-phosphate
  modified_base 21: mod_base = OTHER; note = 2'-O-methylcytidine-3'-phosphate
  modified_base 22: mod_base = OTHER; note = 2'-O-methylcytidine-3'-phosphate
  modified_base 23: mod_base = OTHER; note = 2'-O-methylcytidine
ttccagtgctgacaggtgtgccc

SEQ ID NO: 4853 - RNA, 23 nt, synthetic construct
  source 1..23: mol_type = other RNA
  modified_base 1: mod_base = OTHER; note = 2'-O-methyluridine-3'-phosphate 5'phosphate
  modified_base 2: mod_base = OTHER; note = 2'-deoxy-2'-fluorocytidine-3'-phosphate
  modified_base 3: mod_base = OTHER; note = 2'-O-methyluridine-3'-phosphate
  modified_base 4: mod_base = OTHER; note = 2'-O-methylcytidine-3'-phosphate
  modified_base 5: mod_base = OTHER; note = 2'-O-methylcytidine-3'-phosphate
  modified_base 6: mod_base = OTHER; note = 2'-deoxy-2'-fluoroadenosine-3'-phosphate
  modified_base 7: mod_base = OTHER; note = 2'-O-methylguanosine-3'-phosphate
  modified_base 8: mod_base = OTHER; note = 2'-O-methyluridine-3'-phosphate
  modified_base 9: mod_base = OTHER; note = 2'-O-methylguanosine-3'-phosphate
  modified_base 10: mod_base = OTHER; note = 2'-O-methylcytidine-3'-phosphate
  modified_base 11: mod_base = OTHER; note = 2'-O-methyluridine-3'-phosphate
  modified_base 12: mod_base = OTHER; note = 2'-O-methylguanosine-3'-phosphate
  modified_base 13: mod_base = OTHER; note = 2'-O-methyladenosine-3'-phosphate
  modified_base 14: mod_base = OTHER; note = 2'-deoxy-2'-fluorocytidine-3'-phosphate
  modified_base 15: mod_base = OTHER; note = 2'-O-methyladenosine-3'-phosphate
  modified_base 16: mod_base = OTHER; note = 2'-deoxy-2'-fluoroguanosine-3'-phosphate
  modified_base 17: mod_base = OTHER; note = 2'-O-methylguanosine-3'-phosphate
  modified_base 18: mod_base = OTHER; note = 2'-O-methyluridine-3'-phosphate
  modified_base 19: mod_base = OTHER; note = 2'-O-methylguanosine-3'-phosphate
  modified_base 20: mod_base = OTHER; note = 2'-O-methyluridine-3'-phosphate
  modified_base 21: mod_base = OTHER; note = 2'-O-methylguanosine-3'-phosphate
  modified_base 22: mod_base = OTHER; note = 2'-O-methylcytidine-3'-phosphate
  modified_base 23: mod_base = OTHER; note = 2'-O-methylcytidine
tctccagtgctgacaggtgtgcc

SEQ ID NO: 4854 - RNA, 23 nt, synthetic construct
  source 1..23: mol_type = other RNA
  modified_base 1: mod_base = OTHER; note = 2'-O-methyluridine-3'-phosphate 5'phosphate
  modified_base 2: mod_base = OTHER; note = 2'-deoxy-2'-fluoroadenosine-3'-phosphate
  modified_base 3: mod_base = OTHER; note = 2'-O-methylcytidine-3'-phosphate
  modified_base 4: mod_base = OTHER; note = 2'-O-methyluridine-3'-phosphate
  modified_base 5: mod_base = OTHER; note = 2'-O-methylcytidine-3'-phosphate
  modified_base 6: mod_base = OTHER; note = 2'-deoxy-2'-fluorocytidine-3'-phosphate
  modified_base 7: mod_base = OTHER; note = 2'-O-methyladenosine-3'-phosphate
  modified_base 8: mod_base = OTHER; note = 2'-O-methylguanosine-3'-phosphate
  modified_base 9: mod_base = OTHER; note = 2'-O-methyluridine-3'-phosphate
  modified_base 10: mod_base = OTHER; note = 2'-O-methylguanosine-3'-phosphate
  modified_base 11: mod_base = OTHER; note = 2'-O-methylcytidine-3'-phosphate
  modified_base 12: mod_base = OTHER; note = 2'-O-methyluridine-3'-phosphate
  modified_base 13: mod_base = OTHER; note = 2'-O-methylguanosine-3'-phosphate
  modified_base 14: mod_base = OTHER; note = 2'-deoxy-2'-fluoroadenosine-3'-phosphate
  modified_base 15: mod_base = OTHER; note = 2'-O-methylcytidine-3'-phosphate
  modified_base 16: mod_base = OTHER; note = 2'-deoxy-2'-fluoroadenosine-3'-phosphate
  modified_base 17: mod_base = OTHER; note = 2'-O-methylguanosine-3'-phosphate
  modified_base 18: mod_base = OTHER; note = 2'-O-methylguanosine-3'-phosphate
  modified_base 19: mod_base = OTHER; note = 2'-O-methyluridine-3'-phosphate
  modified_base 20: mod_base = OTHER; note = 2'-O-methylguanosine-3'-phosphate
  modified_base 21: mod_base = OTHER; note = 2'-O-methyluridine-3'-phosphate
  modified_base 22: mod_base = OTHER; note = 2'-O-methylguanosine-3'-phosphate
  modified_base 23: mod_base = OTHER; note = 2'-O-methylcytidine
tactccagtgctgacaggtgtgc

SEQ ID NO: 4855 - RNA, 23 nt, synthetic construct
  source 1..23: mol_type = other RNA
  modified_base 1: mod_base = OTHER; note = 2'-O-methyluridine-3'-phosphate 5'phosphate
  modified_base 2: mod_base = OTHER; note = 2'-deoxy-2'-fluorouridine-3'-phosphate
  modified_base 3: mod_base = OTHER; note = 2'-O-methylguanosine-3'-phosphate
  modified_base 4: mod_base = OTHER; note = 2'-O-methylcytidine-3'-phosphate
  modified_base 5: mod_base = OTHER; note = 2'-O-methyladenosine-3'-phosphate
  modified_base 6: mod_base = OTHER; note = 2'-deoxy-2'-fluorocytidine-3'-phosphate
  modified_base 7: mod_base = OTHER; note = 2'-O-methyluridine-3'-phosphate
  modified_base 8: mod_base = OTHER; note = 2'-O-methylcytidine-3'-phosphate
  modified_base 9: mod_base = OTHER; note = 2'-O-methylcytidine-3'-phosphate
  modified_base 10: mod_base = OTHER; note = 2'-O-methyladenosine-3'-phosphate
  modified_base 11: mod_base = OTHER; note = 2'-O-methylguanosine-3'-phosphate
  modified_base 12: mod_base = OTHER; note = 2'-O-methyluridine-3'-phosphate
  modified_base 13: mod_base = OTHER; note = 2'-O-methylguanosine-3'-phosphate
  modified_base 14: mod_base = OTHER; note = 2'-deoxy-2'-fluorocytidine-3'-phosphate
  modified_base 15: mod_base = OTHER; note = 2'-O-methyluridine-3'-phosphate
  modified_base 16: mod_base = OTHER; note = 2'-deoxy-2'-fluoroguanosine-3'-phosphate
  modified_base 17: mod_base = OTHER; note = 2'-O-methyladenosine-3'-phosphate
  modified_base 18: mod_base = OTHER; note = 2'-O-methylcytidine-3'-phosphate
  modified_base 19: mod_base = OTHER; note = 2'-O-methyladenosine-3'-phosphate
  modified_base 20: mod_base = OTHER; note = 2'-O-methylguanosine-3'-phosphate
  modified_base 21: mod_base = OTHER; note = 2'-O-methylguanosine-3'-phosphate
  modified_base 22: mod_base = OTHER; note = 2'-O-methyluridine-3'-phosphate
  modified_base 23: mod_base = OTHER; note = 2'-O-methylguanosine
ttgcactccagtgctgacaggtg

SEQ ID NO: 4856 - RNA, 23 nt, synthetic construct
  source 1..23: mol_type = other RNA
  modified_base 1: mod_base = OTHER; note = 2'-O-methyluridine-3'-phosphate 5'phosphate
  modified_base 2: mod_base = OTHER; note = 2'-deoxy-2'-fluorouridine-3'-phosphate
  modified_base 3: mod_base = OTHER; note = 2'-O-methylguanosine-3'-phosphate
  modified_base 4: mod_base = OTHER; note = 2'-O-methyluridine-3'-phosphate
  modified_base 5: mod_base = OTHER; note = 2'-O-methylguanosine-3'-phosphate
  modified_base 6: mod_base = OTHER; note = 2'-deoxy-2'-fluorocytidine-3'-phosphate
  modified_base 7: mod_base = OTHER; note = 2'-O-methyladenosine-3'-phosphate
  modified_base 8: mod_base = OTHER; note = 2'-O-methylcytidine-3'-phosphate
  modified_base 9: mod_base = OTHER; note = 2'-O-methyluridine-3'-phosphate
  modified_base 10: mod_base = OTHER; note = 2'-O-methylcytidine-3'-phosphate
  modified_base 11: mod_base = OTHER; note = 2'-O-methylcytidine-3'-phosphate
  modified_base 12: mod_base = OTHER; note = 2'-O-methyladenosine-3'-phosphate
  modified_base 13: mod_base = OTHER; note = 2'-O-methylguanosine-3'-phosphate
  modified_base 14: mod_base = OTHER; note = 2'-deoxy-2'-fluorouridine-3'-phosphate
  modified_base 15: mod_base = OTHER; note = 2'-O-methylguanosine-3'-phosphate
  modified_base 16: mod_base = OTHER; note = 2'-deoxy-2'-fluorocytidine-3'-phosphate
  modified_base 17: mod_base = OTHER; note = 2'-O-methyluridine-3'-phosphate
  modified_base 18: mod_base = OTHER; note = 2'-O-methylguanosine-3'-phosphate
  modified_base 19: mod_base = OTHER; note = 2'-O-methyladenosine-3'-phosphate
  modified_base 20: mod_base = OTHER; note = 2'-O-methylcytidine-3'-phosphate
  modified_base 21: mod_base = OTHER; note = 2'-O-methyladenosine-3'-phosphate
  modified_base 22: mod_base = OTHER; note = 2'-O-methylguanosine-3'-phosphate
  modified_base 23: mod_base = OTHER; note = 2'-O-methylguanosine
ttgtgcactccagtgctgacagg

SEQ ID NO: 4857 - RNA, 23 nt, synthetic construct
  source 1..23: mol_type = other RNA
  modified_base 1: mod_base = OTHER; note = 2'-O-methyluridine-3'-phosphate 5'phosphate
  modified_base 2: mod_base = OTHER; note = 2'-deoxy-2'-fluorouridine-3'-phosphate
  modified_base 3: mod_base = OTHER; note = 2'-O-methylcytidine-3'-phosphate
  modified_base 4: mod_base = OTHER; note = 2'-O-methyluridine-3'-phosphate
  modified_base 5: mod_base = OTHER; note = 2'-O-methylguanosine-3'-phosphate
  modified_base 6: mod_base = OTHER; note = 2'-deoxy-2'-fluorouridine-3'-phosphate
  modified_base 7: mod_base = OTHER; note = 2'-O-methylguanosine-3'-phosphate
  modified_base 8: mod_base = OTHER; note = 2'-O-methylcytidine-3'-phosphate
  modified_base 9: mod_base = OTHER; note = 2'-O-methyladenosine-3'-phosphate
  modified_base 10: mod_base = OTHER; note = 2'-O-methylcytidine-3'-phosphate
  modified_base 11: mod_base = OTHER; note = 2'-O-methyluridine-3'-phosphate
  modified_base 12: mod_base = OTHER; note = 2'-O-methylcytidine-3'-phosphate
  modified_base 13: mod_base = OTHER; note = 2'-O-methylcytidine-3'-phosphate
  modified_base 14: mod_base = OTHER; note = 2'-deoxy-2'-fluoroadenosine-3'-phosphate
  modified_base 15: mod_base = OTHER; note = 2'-O-methylguanosine-3'-phosphate
  modified_base 16: mod_base = OTHER; note = 2'-deoxy-2'-fluorouridine-3'-phosphate
  modified_base 17: mod_base = OTHER; note = 2'-O-methylguanosine-3'-phosphate
  modified_base 18: mod_base = OTHER; note = 2'-O-methylcytidine-3'-phosphate
  modified_base 19: mod_base = OTHER; note = 2'-O-methyluridine-3'-phosphate
  modified_base 20: mod_base = OTHER; note = 2'-O-methylguanosine-3'-phosphate
  modified_base 21: mod_base = OTHER; note = 2'-O-methyladenosine-3'-phosphate
  modified_base 22: mod_base = OTHER; note = 2'-O-methylcytidine-3'-phosphate
  modified_base 23: mod_base = OTHER; note = 2'-O-methyladenosine
ttctgtgcactccagtgctgaca

SEQ ID NO: 4858 - RNA, 23 nt, synthetic construct
  source 1..23: mol_type = other RNA
  modified_base 1: mod_base = OTHER; note = 2'-O-methyluridine-3'-phosphate 5'phosphate
  modified_base 2: mod_base = OTHER; note = 2'-deoxy-2'-fluoroguanosine-3'-phosphate
  modified_base 3: mod_base = OTHER; note = 2'-O-methyluridine-3'-phosphate
  modified_base 4: mod_base = OTHER; note = 2'-O-methylcytidine-3'-phosphate
  modified_base 5: mod_base = OTHER; note = 2'-O-methyluridine-3'-phosphate
  modified_base 6: mod_base = OTHER; note = 2'-deoxy-2'-fluoroguanosine-3'-phosphate
  modified_base 7: mod_base = OTHER; note = 2'-O-methyluridine-3'-phosphate
  modified_base 8: mod_base = OTHER; note = 2'-O-methylguanosine-3'-phosphate
  modified_base 9: mod_base = OTHER; note = 2'-O-methylcytidine-3'-phosphate
  modified_base 10: mod_base = OTHER; note = 2'-O-methyladenosine-3'-phosphate
  modified_base 11: mod_base = OTHER; note = 2'-O-methylcytidine-3'-phosphate
  modified_base 12: mod_base = OTHER; note = 2'-O-methyluridine-3'-phosphate
  modified_base 13: mod_base = OTHER; note = 2'-O-methylcytidine-3'-phosphate
  modified_base 14: mod_base = OTHER; note = 2'-deoxy-2'-fluorocytidine-3'-phosphate
  modified_base 15: mod_base = OTHER; note = 2'-O-methyladenosine-3'-phosphate
  modified_base 16: mod_base = OTHER; note = 2'-deoxy-2'-fluoroguanosine-3'-phosphate
  modified_base 17: mod_base = OTHER; note = 2'-O-methyluridine-3'-phosphate
  modified_base 18: mod_base = OTHER; note = 2'-O-methylguanosine-3'-phosphate
  modified_base 19: mod_base = OTHER; note = 2'-O-methylcytidine-3'-phosphate
  modified_base 20: mod_base = OTHER; note = 2'-O-methyluridine-3'-phosphate
  modified_base 21: mod_base = OTHER; note = 2'-O-methylguanosine-3'-phosphate
  modified_base 22: mod_base = OTHER; note = 2'-O-methyladenosine-3'-phosphate
  modified_base 23: mod_base = OTHER; note = 2'-O-methylcytidine
tgtctgtgcactccagtgctgac

SEQ ID NO: 4859 - RNA, 23 nt, synthetic construct
  source 1..23: mol_type = other RNA
  modified_base 1: mod_base = OTHER; note = 2'-O-methyluridine-3'-phosphate 5'phosphate
  modified_base 2: mod_base = OTHER; note = 2'-deoxy-2'-fluoroguanosine-3'-phosphate
  modified_base 3: mod_base = OTHER; note = 2'-O-methylguanosine-3'-phosphate
  modified_base 4: mod_base = OTHER; note = 2'-O-methyluridine-3'-phosphate
  modified_base 5: mod_base = OTHER; note = 2'-O-methylcytidine-3'-phosphate
  modified_base 6: mod_base = OTHER; note = 2'-deoxy-2'-fluorouridine-3'-phosphate
  modified_base 7: mod_base = OTHER; note = 2'-O-methylguanosine-3'-phosphate
  modified_base 8: mod_base = OTHER; note = 2'-O-methyluridine-3'-phosphate
  modified_base 9: mod_base = OTHER; note = 2'-O-methylguanosine-3'-phosphate
  modified_base 10: mod_base = OTHER; note = 2'-O-methylcytidine-3'-phosphate
  modified_base 11: mod_base = OTHER; note = 2'-O-methyladenosine-3'-phosphate
  modified_base 12: mod_base = OTHER; note = 2'-O-methylcytidine-3'-phosphate
  modified_base 13: mod_base = OTHER; note = 2'-O-methyluridine-3'-phosphate
  modified_base 14: mod_base = OTHER; note = 2'-deoxy-2'-fluorocytidine-3'-phosphate
  modified_base 15: mod_base = OTHER; note = 2'-O-methylcytidine-3'-phosphate
  modified_base 16: mod_base = OTHER; note = 2'-deoxy-2'-fluoroadenosine-3'-phosphate
  modified_base 17: mod_base = OTHER; note = 2'-O-methylguanosine-3'-phosphate
  modified_base 18: mod_base = OTHER; note = 2'-O-methyluridine-3'-phosphate
  modified_base 19: mod_base = OTHER; note = 2'-O-methylguanosine-3'-phosphate
  modified_base 20: mod_base = OTHER; note = 2'-O-methylcytidine-3'-phosphate
  modified_base 21: mod_base = OTHER; note = 2'-O-methyluridine-3'-phosphate
  modified_base 22: mod_base = OTHER; note = 2'-O-methylguanosine-3'-phosphate
  modified_base 23: mod_base = OTHER; note = 2'-O-methyladenosine
tggtctgtgcactccagtgctga

SEQ ID NO: 4860 - RNA, 23 nt, synthetic construct
  source 1..23: mol_type = other RNA
  modified_base 1: mod_base = OTHER; note = 2'-O-methyluridine-3'-phosphate 5'phosphate
  modified_base 2: mod_base = OTHER; note = 2'-deoxy-2'-fluorouridine-3'-phosphate
  modified_base 3: mod_base = OTHER; note = 2'-O-methylguanosine-3'-phosphate
  modified_base 4: mod_base = OTHER; note = 2'-O-methyluridine-3'-phosphate
  modified_base 5: mod_base = OTHER; note = 2'-O-methylcytidine-3'-phosphate
  modified_base 6: mod_base = OTHER; note = 2'-deoxy-2'-fluorocytidine-3'-phosphate
  modified_base 7: mod_base = OTHER; note = 2'-O-methyluridine-3'-phosphate
  modified_base 8: mod_base = OTHER; note = 2'-O-methylguanosine-3'-phosphate
  modified_base 9: mod_base = OTHER; note = 2'-O-methyluridine-3'-phosphate
  modified_base 10: mod_base = OTHER; note = 2'-O-methyluridine-3'-phosphate
  modified_base 11: mod_base = OTHER; note = 2'-O-methyladenosine-3'-phosphate
  modified_base 12: mod_base = OTHER; note = 2'-O-methyluridine-3'-phosphate
  modified_base 13: mod_base = OTHER; note = 2'-O-methylguanosine-3'-phosphate
  modified_base 14: mod_base = OTHER; note = 2'-deoxy-2'-fluorouridine-3'-phosphate
  modified_base 15: mod_base = OTHER; note = 2'-O-methylguanosine-3'-phosphate
  modified_base 16: mod_base = OTHER; note = 2'-deoxy-2'-fluorouridine-3'-phosphate
  modified_base 17: mod_base = OTHER; note = 2'-O-methylguanosine-3'-phosphate
  modified_base 18: mod_base = OTHER; note = 2'-O-methyluridine-3'-phosphate
  modified_base 19: mod_base = OTHER; note = 2'-O-methylguanosine-3'-phosphate
  modified_base 20: mod_base = OTHER; note = 2'-O-methyladenosine-3'-phosphate
  modified_base 21: mod_base = OTHER; note = 2'-O-methylguanosine-3'-phosphate
  modified_base 22: mod_base = OTHER; note = 2'-O-methylguanosine-3'-phosphate
  modified_base 23: mod_base = OTHER; note = 2'-O-methylguanosine
ttgtcctgttatgtgtgtgaggg

SEQ ID NO: 4861 - RNA, 23 nt, synthetic construct
  source 1..23: mol_type = other RNA
  modified_base 1: mod_base = OTHER; note = 2'-O-methyluridine-3'-phosphate 5'phosphate
  modified_base 2: mod_base = OTHER; note = 2'-deoxy-2'-fluoroguanosine-3'-phosphate
  modified_base 3: mod_base = OTHER; note = 2'-O-methylguanosine-3'-phosphate
  modified_base 4: mod_base = OTHER; note = 2'-O-methyluridine-3'-phosphate
  modified_base 5: mod_base = OTHER; note = 2'-O-methylguanosine-3'-phosphate
  modified_base 6: mod_base = OTHER; note = 2'-deoxy-2'-fluorouridine-3'-phosphate
  modified_base 7: mod_base = OTHER; note = 2'-O-methylcytidine-3'-phosphate
  modified_base 8: mod_base = OTHER; note = 2'-O-methylcytidine-3'-phosphate
  modified_base 9: mod_base = OTHER; note = 2'-O-methyluridine-3'-phosphate
  modified_base 10: mod_base = OTHER; note = 2'-O-methylguanosine-3'-phosphate
  modified_base 11: mod_base = OTHER; note = 2'-O-methyluridine-3'-phosphate
  modified_base 12: mod_base = OTHER; note = 2'-O-methyluridine-3'-phosphate
  modified_base 13: mod_base = OTHER; note = 2'-O-methyladenosine-3'-phosphate
  modified_base 14: mod_base = OTHER; note = 2'-deoxy-2'-fluorouridine-3'-phosphate
  modified_base 15: mod_base = OTHER; note = 2'-O-methylguanosine-3'-phosphate
  modified_base 16: mod_base = OTHER; note = 2'-deoxy-2'-fluorouridine-3'-phosphate
  modified_base 17: mod_base = OTHER; note = 2'-O-methylguanosine-3'-phosphate
  modified_base 18: mod_base = OTHER; note = 2'-O-methyluridine-3'-phosphate
  modified_base 19: mod_base = OTHER; note = 2'-O-methylguanosine-3'-phosphate
  modified_base 20: mod_base = OTHER; note = 2'-O-methyluridine-3'-phosphate
  modified_base 21: mod_base = OTHER; note = 2'-O-methylguanosine-3'-phosphate
  modified_base 22: mod_base = OTHER; note = 2'-O-methyladenosine-3'-phosphate
  modified_base 23: mod_base = OTHER; note = 2'-O-methylguanosine
tggtgtcctgttatgtgtgtgag

SEQ ID NO: 4862 - RNA, 23 nt, synthetic construct
  source 1..23: mol_type = other RNA
  modified_base 1: mod_base = OTHER; note = 2'-O-methyluridine-3'-phosphate 5'phosphate
  modified_base 2: mod_base = OTHER; note = 2'-deoxy-2'-fluorouridine-3'-phosphate
  modified_base 3: mod_base = OTHER; note = 2'-O-methylguanosine-3'-phosphate
  modified_base 4: mod_base = OTHER; note = 2'-O-methylguanosine-3'-phosphate
  modified_base 5: mod_base = OTHER; note = 2'-O-methyluridine-3'-phosphate
  modified_base 6: mod_base = OTHER; note = 2'-deoxy-2'-fluoroguanosine-3'-phosphate
  modified_base 7: mod_base = OTHER; note = 2'-O-methyluridine-3'-phosphate
  modified_base 8: mod_base = OTHER; note = 2'-O-methylcytidine-3'-phosphate
  modified_base 9: mod_base = OTHER; note = 2'-O-methylcytidine-3'-phosphate
  modified_base 10: mod_base = OTHER; note = 2'-O-methyluridine-3'-phosphate
  modified_base 11: mod_base = OTHER; note = 2'-O-methylguanosine-3'-phosphate
  modified_base 12: mod_base = OTHER; note = 2'-O-methyluridine-3'-phosphate
  modified_base 13: mod_base = OTHER; note = 2'-O-methyluridine-3'-phosphate
  modified_base 14: mod_base = OTHER; note = 2'-deoxy-2'-fluoroadenosine-3'-phosphate
  modified_base 15: mod_base = OTHER; note = 2'-O-methyluridine-3'-phosphate
  modified_base 16: mod_base = OTHER; note = 2'-deoxy-2'-fluoroguanosine-3'-phosphate
  modified_base 17: mod_base = OTHER; note = 2'-O-methyluridine-3'-phosphate
  modified_base 18: mod_base = OTHER; note = 2'-O-methylguanosine-3'-phosphate
  modified_base 19: mod_base = OTHER; note = 2'-O-methyluridine-3'-phosphate
  modified_base 20: mod_base = OTHER; note = 2'-O-methylguanosine-3'-phosphate
  modified_base 21: mod_base = OTHER; note = 2'-O-methyluridine-3'-phosphate
  modified_base 22: mod_base = OTHER; note = 2'-O-methylguanosine-3'-phosphate
  modified_base 23: mod_base = OTHER; note = 2'-O-methyladenosine
ttggtgtcctgttatgtgtgtga

SEQ ID NO: 4863 - RNA, 23 nt, synthetic construct
  source 1..23: mol_type = other RNA
  modified_base 1: mod_base = OTHER; note = 2'-O-methyluridine-3'-phosphate 5'phosphate
  modified_base 2: mod_base = OTHER; note = 2'-deoxy-2'-fluorocytidine-3'-phosphate
  modified_base 3: mod_base = OTHER; note = 2'-O-methyluridine-3'-phosphate
  modified_base 4: mod_base = OTHER; note = 2'-O-methylguanosine-3'-phosphate
  modified_base 5: mod_base = OTHER; note = 2'-O-methylguanosine-3'-phosphate
  modified_base 6: mod_base = OTHER; note = 2'-deoxy-2'-fluorouridine-3'-phosphate
  modified_base 7: mod_base = OTHER; note = 2'-O-methylguanosine-3'-phosphate
  modified_base 8: mod_base = OTHER; note = 2'-O-methyluridine-3'-phosphate
  modified_base 9: mod_base = OTHER; note = 2'-O-methylcytidine-3'-phosphate
  modified_base 10: mod_base = OTHER; note = 2'-O-methylcytidine-3'-phosphate
  modified_base 11: mod_base = OTHER; note = 2'-O-methyluridine-3'-phosphate
  modified_base 12: mod_base = OTHER; note = 2'-O-methylguanosine-3'-phosphate
  modified_base 13: mod_base = OTHER; note = 2'-O-methyluridine-3'-phosphate
  modified_base 14: mod_base = OTHER; note = 2'-deoxy-2'-fluorouridine-3'-phosphate
  modified_base 15: mod_base = OTHER; note = 2'-O-methyladenosine-3'-phosphate
  modified_base 16: mod_base = OTHER; note = 2'-deoxy-2'-fluorouridine-3'-phosphate
  modified_base 17: mod_base = OTHER; note = 2'-O-methylguanosine-3'-phosphate
  modified_base 18: mod_base = OTHER; note = 2'-O-methyluridine-3'-phosphate
  modified_base 19: mod_base = OTHER; note = 2'-O-methylguanosine-3'-phosphate
  modified_base 20: mod_base = OTHER; note = 2'-O-methyluridine-3'-phosphate
  modified_base 21: mod_base = OTHER; note = 2'-O-methylguanosine-3'-phosphate
  modified_base 22: mod_base = OTHER; note = 2'-O-methyluridine-3'-phosphate
  modified_base 23: mod_base = OTHER; note = 2'-O-methylguanosine
tctggtgtcctgttatgtgtgtg

SEQ ID NO: 4864 - RNA, 23 nt, synthetic construct
  source 1..23: mol_type = other RNA
  modified_base 1: mod_base = OTHER; note = 2'-O-methyluridine-3'-phosphate 5'phosphate
  modified_base 2: mod_base = OTHER; note = 2'-deoxy-2'-fluorouridine-3'-phosphate
  modified_base 3: mod_base = OTHER; note = 2'-O-methylcytidine-3'-phosphate
  modified_base 4: mod_base = OTHER; note = 2'-O-methyluridine-3'-phosphate
  modified_base 5: mod_base = OTHER; note = 2'-O-methylguanosine-3'-phosphate
  modified_base 6: mod_base = OTHER; note = 2'-deoxy-2'-fluoroguanosine-3'-phosphate
  modified_base 7: mod_base = OTHER; note = 2'-O-methyluridine-3'-phosphate
  modified_base 8: mod_base = OTHER; note = 2'-O-methylguanosine-3'-phosphate
  modified_base 9: mod_base = OTHER; note = 2'-O-methyluridine-3'-phosphate
  modified_base 10: mod_base = OTHER; note = 2'-O-methylcytidine-3'-phosphate
  modified_base 11: mod_base = OTHER; note = 2'-O-methylcytidine-3'-phosphate
  modified_base 12: mod_base = OTHER; note = 2'-O-methyluridine-3'-phosphate
  modified_base 13: mod_base = OTHER; note = 2'-O-methylguanosine-3'-phosphate
  modified_base 14: mod_base = OTHER; note = 2'-deoxy-2'-fluorouridine-3'-phosphate
  modified_base 15: mod_base = OTHER; note = 2'-O-methyluridine-3'-phosphate
  modified_base 16: mod_base = OTHER; note = 2'-deoxy-2'-fluoroadenosine-3'-phosphate
  modified_base 17: mod_base = OTHER; note = 2'-O-methyluridine-3'-phosphate
  modified_base 18: mod_base = OTHER; note = 2'-O-methylguanosine-3'-phosphate
  modified_base 19: mod_base = OTHER; note = 2'-O-methyluridine-3'-phosphate
  modified_base 20: mod_base = OTHER; note = 2'-O-methylguanosine-3'-phosphate
  modified_base 21: mod_base = OTHER; note = 2'-O-methyluridine-3'-phosphate
  modified_base 22: mod_base = OTHER; note = 2'-O-methylguanosine-3'-phosphate
  modified_base 23: mod_base = OTHER; note = 2'-O-methyluridine
ttctggtgtcctgttatgtgtgt

SEQ ID NO: 4865 - RNA, 23 nt, synthetic construct
  source 1..23: mol_type = other RNA
  modified_base 1: mod_base = OTHER; note = 2'-O-methyluridine-3'-phosphate 5'phosphate
  modified_base 2: mod_base = OTHER; note = 2'-deoxy-2'-fluorouridine-3'-phosphate
  modified_base 3: mod_base = OTHER; note = 2'-O-methyluridine-3'-phosphate
  modified_base 4: mod_base = OTHER; note = 2'-O-methylcytidine-3'-phosphate
  modified_base 5: mod_base = OTHER; note = 2'-O-methyluridine-3'-phosphate
  modified_base 6: mod_base = OTHER; note = 2'-deoxy-2'-fluoroguanosine-3'-phosphate
  modified_base 7: mod_base = OTHER; note = 2'-O-methylguanosine-3'-phosphate
  modified_base 8: mod_base = OTHER; note = 2'-O-methyluridine-3'-phosphate
  modified_base 9: mod_base = OTHER; note = 2'-O-methylguanosine-3'-phosphate
  modified_base 10: mod_base = OTHER; note = 2'-O-methyluridine-3'-phosphate
  modified_base 11: mod_base = OTHER; note = 2'-O-methylcytidine-3'-phosphate
  modified_base 12: mod_base = OTHER; note = 2'-O-methylcytidine-3'-phosphate
  modified_base 13: mod_base = OTHER; note = 2'-O-methyluridine-3'-phosphate
  modified_base 14: mod_base = OTHER; note = 2'-deoxy-2'-fluoroguanosine-3'-phosphate
  modified_base 15: mod_base = OTHER; note = 2'-O-methyluridine-3'-phosphate
  modified_base 16: mod_base = OTHER; note = 2'-deoxy-2'-fluorouridine-3'-phosphate
  modified_base 17: mod_base = OTHER; note = 2'-O-methyladenosine-3'-phosphate
  modified_base 18: mod_base = OTHER; note = 2'-O-methyluridine-3'-phosphate
  modified_base 19: mod_base = OTHER; note = 2'-O-methylguanosine-3'-phosphate
  modified_base 20: mod_base = OTHER; note = 2'-O-methyluridine-3'-phosphate
  modified_base 21: mod_base = OTHER; note = 2'-O-methylguanosine-3'-phosphate
  modified_base 22: mod_base = OTHER; note = 2'-O-methyluridine-3'-phosphate
  modified_base 23: mod_base = OTHER; note = 2'-O-methylguanosine
tttctggtgtcctgttatgtgtg

SEQ ID NO: 4866 - RNA, 23 nt, synthetic construct
  source 1..23: mol_type = other RNA
  modified_base 1: mod_base = OTHER; note = 2'-O-methyluridine-3'-phosphate 5'phosphate
  modified_base 2: mod_base = OTHER; note = 2'-deoxy-2'-fluorouridine-3'-phosphate
  modified_base 3: mod_base = OTHER; note = 2'-O-methyluridine-3'-phosphate
  modified_base 4: mod_base = OTHER; note = 2'-O-methyluridine-3'-phosphate
  modified_base 5: mod_base = OTHER; note = 2'-O-methylcytidine-3'-phosphate
  modified_base 6: mod_base = OTHER; note = 2'-deoxy-2'-fluorouridine-3'-phosphate
  modified_base 7: mod_base = OTHER; note = 2'-O-methylguanosine-3'-phosphate
  modified_base 8: mod_base = OTHER; note = 2'-O-methylguanosine-3'-phosphate
  modified_base 9: mod_base = OTHER; note = 2'-O-methyluridine-3'-phosphate
  modified_base 10: mod_base = OTHER; note = 2'-O-methylguanosine-3'-phosphate
  modified_base 11: mod_base = OTHER; note = 2'-O-methyluridine-3'-phosphate
  modified_base 12: mod_base = OTHER; note = 2'-O-methylcytidine-3'-phosphate
  modified_base 13: mod_base = OTHER; note = 2'-O-methylcytidine-3'-phosphate
  modified_base 14: mod_base = OTHER; note = 2'-deoxy-2'-fluorouridine-3'-phosphate
  modified_base 15: mod_base = OTHER; note = 2'-O-methylguanosine-3'-phosphate
  modified_base 16: mod_base = OTHER; note = 2'-deoxy-2'-fluorouridine-3'-phosphate
  modified_base 17: mod_base = OTHER; note = 2'-O-methyluridine-3'-phosphate
  modified_base 18: mod_base = OTHER; note = 2'-O-methyladenosine-3'-phosphate
  modified_base 19: mod_base = OTHER; note = 2'-O-methyluridine-3'-phosphate
  modified_base 20: mod_base = OTHER; note = 2'-O-methylguanosine-3'-phosphate
  modified_base 21: mod_base = OTHER; note = 2'-O-methyluridine-3'-phosphate
  modified_base 22: mod_base = OTHER; note = 2'-O-methylguanosine-3'-phosphate
  modified_base 23: mod_base = OTHER; note = 2'-O-methyluridine
ttttctggtgtcctgttatgtgt

SEQ ID NO: 4867 - RNA, 23 nt, synthetic construct
  source 1..23: mol_type = other RNA
  modified_base 1: mod_base = OTHER; note = 2'-O-methyluridine-3'-phosphate 5'phosphate
  modified_base 2: mod_base = OTHER; note = 2'-deoxy-2'-fluorouridine-3'-phosphate
  modified_base 3: mod_base = OTHER; note = 2'-O-methyluridine-3'-phosphate
  modified_base 4: mod_base = OTHER; note = 2'-O-methyluridine-3'-phosphate
  modified_base 5: mod_base = OTHER; note = 2'-O-methyluridine-3'-phosphate
  modified_base 6: mod_base = OTHER; note = 2'-deoxy-2'-fluorocytidine-3'-phosphate
  modified_base 7: mod_base = OTHER; note = 2'-O-methyluridine-3'-phosphate
  modified_base 8: mod_base = OTHER; note = 2'-O-methylguanosine-3'-phosphate
  modified_base 9: mod_base = OTHER; note = 2'-O-methylguanosine-3'-phosphate
  modified_base 10: mod_base = OTHER; note = 2'-O-methyluridine-3'-phosphate
  modified_base 11: mod_base = OTHER; note = 2'-O-methylguanosine-3'-phosphate
  modified_base 12: mod_base = OTHER; note = 2'-O-methyluridine-3'-phosphate
  modified_base 13: mod_base = OTHER; note = 2'-O-methylcytidine-3'-phosphate
  modified_base 14: mod_base = OTHER; note = 2'-deoxy-2'-fluorocytidine-3'-phosphate
  modified_base 15: mod_base = OTHER; note = 2'-O-methyluridine-3'-phosphate
  modified_base 16: mod_base = OTHER; note = 2'-deoxy-2'-fluoroguanosine-3'-phosphate
  modified_base 17: mod_base = OTHER; note = 2'-O-methyluridine-3'-phosphate
  modified_base 18: mod_base = OTHER; note = 2'-O-methyluridine-3'-phosphate
  modified_base 19: mod_base = OTHER; note = 2'-O-methyladenosine-3'-phosphate
  modified_base 20: mod_base = OTHER; note = 2'-O-methyluridine-3'-phosphate
  modified_base 21: mod_base = OTHER; note = 2'-O-methylguanosine-3'-phosphate
  modified_base 22: mod_base = OTHER; note = 2'-O-methyluridine-3'-phosphate
  modified_base 23: mod_base = OTHER; note = 2'-O-methylguanosine
tttttctggtgtcctgttatgtg

SEQ ID NO: 4868 - RNA, 23 nt, synthetic construct
  source 1..23: mol_type = other RNA
  modified_base 1: mod_base = OTHER; note = 2'-O-methyluridine-3'-phosphate 5'phosphate
  modified_base 2: mod_base = OTHER; note = 2'-deoxy-2'-fluoroguanosine-3'-phosphate
  modified_base 3: mod_base = OTHER; note = 2'-O-methyluridine-3'-phosphate
  modified_base 4: mod_base = OTHER; note = 2'-O-methyluridine-3'-phosphate
  modified_base 5: mod_base = OTHER; note = 2'-O-methyluridine-3'-phosphate
  modified_base 6: mod_base = OTHER; note = 2'-deoxy-2'-fluorouridine-3'-phosphate
  modified_base 7: mod_base = OTHER; note = 2'-O-methylcytidine-3'-phosphate
  modified_base 8: mod_base = OTHER; note = 2'-O-methyluridine-3'-phosphate
  modified_base 9: mod_base = OTHER; note = 2'-O-methylguanosine-3'-phosphate
  modified_base 10: mod_base = OTHER; note = 2'-O-methylguanosine-3'-phosphate
  modified_base 11: mod_base = OTHER; note = 2'-O-methyluridine-3'-phosphate
  modified_base 12: mod_base = OTHER; note = 2'-O-methylguanosine-3'-phosphate
  modified_base 13: mod_base = OTHER; note = 2'-O-methyluridine-3'-phosphate
  modified_base 14: mod_base = OTHER; note = 2'-deoxy-2'-fluorocytidine-3'-phosphate
  modified_base 15: mod_base = OTHER; note = 2'-O-methylcytidine-3'-phosphate
  modified_base 16: mod_base = OTHER; note = 2'-deoxy-2'-fluorouridine-3'-phosphate
  modified_base 17: mod_base = OTHER; note = 2'-O-methylguanosine-3'-phosphate
  modified_base 18: mod_base = OTHER; note = 2'-O-methyluridine-3'-phosphate
  modified_base 19: mod_base = OTHER; note = 2'-O-methyluridine-3'-phosphate
  modified_base 20: mod_base = OTHER; note = 2'-O-methyladenosine-3'-phosphate
  modified_base 21: mod_base = OTHER; note = 2'-O-methyluridine-3'-phosphate
  modified_base 22: mod_base = OTHER; note = 2'-O-methylguanosine-3'-phosphate
  modified_base 23: mod_base = OTHER; note = 2'-O-methyluridine
tgttttctggtgtcctgttatgt

SEQ ID NO: 4869 - RNA, 23 nt, synthetic construct
  source 1..23: mol_type = other RNA
  modified_base 1: mod_base = OTHER; note = 2'-O-methyluridine-3'-phosphate 5'phosphate
  modified_base 2: mod_base = OTHER; note = 2'-deoxy-2'-fluoroadenosine-3'-phosphate
  modified_base 3: mod_base = OTHER; note = 2'-O-methylguanosine-3'-phosphate
  modified_base 4: mod_base = OTHER; note = 2'-O-methyluridine-3'-phosphate
  modified_base 5: mod_base = OTHER; note = 2'-O-methyluridine-3'-phosphate
  modified_base 6: mod_base = OTHER; note = 2'-deoxy-2'-fluorouridine-3'-phosphate
  modified_base 7: mod_base = OTHER; note = 2'-O-methyluridine-3'-phosphate
  modified_base 8: mod_base = OTHER; note = 2'-O-methylcytidine-3'-phosphate
  modified_base 9: mod_base = OTHER; note = 2'-O-methyluridine-3'-phosphate
  modified_base 10: mod_base = OTHER; note = 2'-O-methylguanosine-3'-phosphate
  modified_base 11: mod_base = OTHER; note = 2'-O-methylguanosine-3'-phosphate
  modified_base 12: mod_base = OTHER; note = 2'-O-methyluridine-3'-phosphate
  modified_base 13: mod_base = OTHER; note = 2'-O-methylguanosine-3'-phosphate
  modified_base 14: mod_base = OTHER; note = 2'-deoxy-2'-fluorouridine-3'-phosphate
  modified_base 15: mod_base = OTHER; note = 2'-O-methylcytidine-3'-phosphate
  modified_base 16: mod_base = OTHER; note = 2'-deoxy-2'-fluorocytidine-3'-phosphate
  modified_base 17: mod_base = OTHER; note = 2'-O-methyluridine-3'-phosphate
  modified_base 18: mod_base = OTHER; note = 2'-O-methylguanosine-3'-phosphate
  modified_base 19: mod_base = OTHER; note = 2'-O-methyluridine-3'-phosphate
  modified_base 20: mod_base = OTHER; note = 2'-O-methyluridine-3'-phosphate
  modified_base 21: mod_base = OTHER; note = 2'-O-methyladenosine-3'-phosphate
  modified_base 22: mod_base = OTHER; note = 2'-O-methyluridine-3'-phosphate
  modified_base 23: mod_base = OTHER; note = 2'-O-methylguanosine
tagttttctggtgtcctgttatg

SEQ ID NO: 4870 - RNA, 23 nt, synthetic construct
  source 1..23: mol_type = other RNA
  modified_base 1: mod_base = OTHER; note = 2'-O-methyluridine-3'-phosphate 5'phosphate
  modified_base 2: mod_base = OTHER; note = 2'-deoxy-2'-fluoroadenosine-3'-phosphate
  modified_base 3: mod_base = OTHER; note = 2'-O-methyladenosine-3'-phosphate
  modified_base 4: mod_base = OTHER; note = 2'-O-methylguanosine-3'-phosphate
  modified_base 5: mod_base = OTHER; note = 2'-O-methyluridine-3'-phosphate
  modified_base 6: mod_base = OTHER; note = 2'-deoxy-2'-fluorouridine-3'-phosphate
  modified_base 7: mod_base = OTHER; note = 2'-O-methyluridine-3'-phosphate
  modified_base 8: mod_base = OTHER; note = 2'-O-methyluridine-3'-phosphate
  modified_base 9: mod_base = OTHER; note = 2'-O-methylcytidine-3'-phosphate
  modified_base 10: mod_base = OTHER; note = 2'-O-methyluridine-3'-phosphate
  modified_base 11: mod_base = OTHER; note = 2'-O-methylguanosine-3'-phosphate
  modified_base 12: mod_base = OTHER; note = 2'-O-methylguanosine-3'-phosphate
  modified_base 13: mod_base = OTHER; note = 2'-O-methyluridine-3'-phosphate
  modified_base 14: mod_base = OTHER; note = 2'-deoxy-2'-fluoroguanosine-3'-phosphate
  modified_base 15: mod_base = OTHER; note = 2'-O-methyluridine-3'-phosphate
  modified_base 16: mod_base = OTHER; note = 2'-deoxy-2'-fluorocytidine-3'-phosphate
  modified_base 17: mod_base = OTHER; note = 2'-O-methylcytidine-3'-phosphate
  modified_base 18: mod_base = OTHER; note = 2'-O-methyluridine-3'-phosphate
  modified_base 19: mod_base = OTHER; note = 2'-O-methylguanosine-3'-phosphate
  modified_base 20: mod_base = OTHER; note = 2'-O-methyluridine-3'-phosphate
  modified_base 21: mod_base = OTHER; note = 2'-O-methyluridine-3'-phosphate
  modified_base 22: mod_base = OTHER; note = 2'-O-methyladenosine-3'-phosphate
  modified_base 23: mod_base = OTHER; note = 2'-O-methyluridine
taagttttctggtgtcctgttat

SEQ ID NO: 4871 - RNA, 23 nt, synthetic construct
  source 1..23: mol_type = other RNA
  modified_base 1: mod_base = OTHER; note = 2'-O-methyluridine-3'-phosphate 5'phosphate
  modified_base 2: mod_base = OTHER; note = 2'-deoxy-2'-fluorouridine-3'-phosphate
  modified_base 3: mod_base = OTHER; note = 2'-O-methyluridine-3'-phosphate
  modified_base 4: mod_base = OTHER; note = 2'-O-methylcytidine-3'-phosphate
  modified_base 5: mod_base = OTHER; note = 2'-O-methyladenosine-3'-phosphate
  modified_base 6: mod_base = OTHER; note = 2'-deoxy-2'-fluorouridine-3'-phosphate
  modified_base 7: mod_base = OTHER; note = 2'-O-methylcytidine-3'-phosphate
  modified_base 8: mod_base = OTHER; note = 2'-O-methylcytidine-3'-phosphate
  modified_base 9: mod_base = OTHER; note = 2'-O-methyladenosine-3'-phosphate
  modified_base 10: mod_base = OTHER; note = 2'-O-methyladenosine-3'-phosphate
  modified_base 11: mod_base = OTHER; note = 2'-O-methyladenosine-3'-phosphate
  modified_base 12: mod_base = OTHER; note = 2'-O-methyluridine-3'-phosphate
  modified_base 13: mod_base = OTHER; note = 2'-O-methyluridine-3'-phosphate
  modified_base 14: mod_base = OTHER; note = 2'-deoxy-2'-fluorouridine-3'-phosphate
  modified_base 15: mod_base = OTHER; note = 2'-O-methyluridine-3'-phosphate
  modified_base 16: mod_base = OTHER; note = 2'-deoxy-2'-fluorouridine-3'-phosphate
  modified_base 17: mod_base = OTHER; note = 2'-O-methylguanosine-3'-phosphate
  modified_base 18: mod_base = OTHER; note = 2'-O-methylcytidine-3'-phosphate
  modified_base 19: mod_base = OTHER; note = 2'-O-methyladenosine-3'-phosphate
  modified_base 20: mod_base = OTHER; note = 2'-O-methylguanosine-3'-phosphate
  modified_base 21: mod_base = OTHER; note = 2'-O-methylguanosine-3'-phosphate
  modified_base 22: mod_base = OTHER; note = 2'-O-methylguanosine-3'-phosphate
  modified_base 23: mod_base = OTHER; note = 2'-O-methylguanosine
tttcatccaaatttttgcagggg

SEQ ID NO: 4872 - RNA, 23 nt, synthetic construct
  source 1..23: mol_type = other RNA
  modified_base 1: mod_base = OTHER; note = 2'-O-methyluridine-3'-phosphate 5'phosphate
  modified_base 2: mod_base = OTHER; note = 2'-deoxy-2'-fluorouridine-3'-phosphate
  modified_base 3: mod_base = OTHER; note = 2'-O-methyluridine-3'-phosphate
  modified_base 4: mod_base = OTHER; note = 2'-O-methyluridine-3'-phosphate
  modified_base 5: mod_base = OTHER; note = 2'-O-methylcytidine-3'-phosphate
  modified_base 6: mod_base = OTHER; note = 2'-deoxy-2'-fluoroadenosine-3'-phosphate
  modified_base 7: mod_base = OTHER; note = 2'-O-methyluridine-3'-phosphate
  modified_base 8: mod_base = OTHER; note = 2'-O-methylcytidine-3'-phosphate
  modified_base 9: mod_base = OTHER; note = 2'-O-methylcytidine-3'-phosphate
  modified_base 10: mod_base = OTHER; note = 2'-O-methyladenosine-3'-phosphate
  modified_base 11: mod_base = OTHER; note = 2'-O-methyladenosine-3'-phosphate
  modified_base 12: mod_base = OTHER; note = 2'-O-methyladenosine-3'-phosphate
  modified_base 13: mod_base = OTHER; note = 2'-O-methyluridine-3'-phosphate
  modified_base 14: mod_base = OTHER; note = 2'-deoxy-2'-fluorouridine-3'-phosphate
  modified_base 15: mod_base = OTHER; note = 2'-O-methyluridine-3'-phosphate
  modified_base 16: mod_base = OTHER; note = 2'-deoxy-2'-fluorouridine-3'-phosphate
  modified_base 17: mod_base = OTHER; note = 2'-O-methyluridine-3'-phosphate
  modified_base 18: mod_base = OTHER; note = 2'-O-methylguanosine-3'-phosphate
  modified_base 19: mod_base = OTHER; note = 2'-O-methylcytidine-3'-phosphate
  modified_base 20: mod_base = OTHER; note = 2'-O-methyladenosine-3'-phosphate
  modified_base 21: mod_base = OTHER; note = 2'-O-methylguanosine-3'-phosphate
  modified_base 22: mod_base = OTHER; note = 2'-O-methylguanosine-3'-phosphate
  modified_base 23: mod_base = OTHER; note = 2'-O-methylguanosine
ttttcatccaaatttttgcaggg

SEQ ID NO: 4873 - RNA, 23 nt, synthetic construct
  source 1..23: mol_type = other RNA
  modified_base 1: mod_base = OTHER; note = 2'-O-methyluridine-3'-phosphate 5'phosphate
  modified_base 2: mod_base = OTHER; note = 2'-deoxy-2'-fluorouridine-3'-phosphate
  modified_base 3: mod_base = OTHER; note = 2'-O-methyluridine-3'-phosphate
  modified_base 4: mod_base = OTHER; note = 2'-O-methyluridine-3'-phosphate
  modified_base 5: mod_base = OTHER; note = 2'-O-methyluridine-3'-phosphate
  modified_base 6: mod_base = OTHER; note = 2'-deoxy-2'-fluorocytidine-3'-phosphate
  modified_base 7: mod_base = OTHER; note = 2'-O-methyladenosine-3'-phosphate
  modified_base 8: mod_base = OTHER; note = 2'-O-methyluridine-3'-phosphate
  modified_base 9: mod_base = OTHER; note = 2'-O-methylcytidine-3'-phosphate
  modified_base 10: mod_base = OTHER; note = 2'-O-methylcytidine-3'-phosphate
  modified_base 11: mod_base = OTHER; note = 2'-O-methyladenosine-3'-phosphate
  modified_base 12: mod_base = OTHER; note = 2'-O-methyladenosine-3'-phosphate
  modified_base 13: mod_base = OTHER; note = 2'-O-methyladenosine-3'-phosphate
  modified_base 14: mod_base = OTHER; note = 2'-deoxy-2'-fluorouridine-3'-phosphate
  modified_base 15: mod_base = OTHER; note = 2'-O-methyluridine-3'-phosphate
  modified_base 16: mod_base = OTHER; note = 2'-deoxy-2'-fluorouridine-3'-phosphate
  modified_base 17: mod_base = OTHER; note = 2'-O-methyluridine-3'-phosphate
  modified_base 18: mod_base = OTHER; note = 2'-O-methyluridine-3'-phosphate
  modified_base 19: mod_base = OTHER; note = 2'-O-methylguanosine-3'-phosphate
  modified_base 20: mod_base = OTHER; note = 2'-O-methylcytidine-3'-phosphate
  modified_base 21: mod_base = OTHER; note = 2'-O-methyladenosine-3'-phosphate
  modified_base 22: mod_base = OTHER; note = 2'-O-methylguanosine-3'-phosphate
  modified_base 23: mod_base = OTHER; note = 2'-O-methylguanosine
tttttcatccaaatttttgcagg

SEQ ID NO: 4874 - RNA, 23 nt, synthetic construct
  source 1..23: mol_type = other RNA
  modified_base 1: mod_base = OTHER; note = 2'-O-methyluridine-3'-phosphate 5'phosphate
  modified_base 2: mod_base = OTHER; note = 2'-deoxy-2'-fluoroguanosine-3'-phosphate
  modified_base 3: mod_base = OTHER; note = 2'-O-methyluridine-3'-phosphate
  modified_base 4: mod_base = OTHER; note = 2'-O-methyluridine-3'-phosphate
  modified_base 5: mod_base = OTHER; note = 2'-O-methyluridine-3'-phosphate
  modified_base 6: mod_base = OTHER; note = 2'-deoxy-2'-fluorouridine-3'-phosphate
  modified_base 7: mod_base = OTHER; note = 2'-O-methylcytidine-3'-phosphate
  modified_base 8: mod_base = OTHER; note = 2'-O-methyladenosine-3'-phosphate
  modified_base 9: mod_base = OTHER; note = 2'-O-methyluridine-3'-phosphate
  modified_base 10: mod_base = OTHER; note = 2'-O-methylcytidine-3'-phosphate
  modified_base 11: mod_base = OTHER; note = 2'-O-methylcytidine-3'-phosphate
  modified_base 12: mod_base = OTHER; note = 2'-O-methyladenosine-3'-phosphate
  modified_base 13: mod_base = OTHER; note = 2'-O-methyladenosine-3'-phosphate
  modified_base 14: mod_base = OTHER; note = 2'-deoxy-2'-fluoroadenosine-3'-phosphate
  modified_base 15: mod_base = OTHER; note = 2'-O-methyluridine-3'-phosphate
  modified_base 16: mod_base = OTHER; note = 2'-deoxy-2'-fluorouridine-3'-phosphate
  modified_base 17: mod_base = OTHER; note = 2'-O-methyluridine-3'-phosphate
  modified_base 18: mod_base = OTHER; note = 2'-O-methyluridine-3'-phosphate
  modified_base 19: mod_base = OTHER; note = 2'-O-methyluridine-3'-phosphate
  modified_base 20: mod_base = OTHER; note = 2'-O-methylguanosine-3'-phosphate
  modified_base 21: mod_base = OTHER; note = 2'-O-methylcytidine-3'-phosphate
  modified_base 22: mod_base = OTHER; note = 2'-O-methyladenosine-3'-phosphate
  modified_base 23: mod_base = OTHER; note = 2'-O-methylguanosine
tgttttcatccaaatttttgcag

SEQ ID NO: 4875 - RNA, 23 nt, synthetic construct
  source 1..23: mol_type = other RNA
  modified_base 1: mod_base = OTHER; note = 2'-O-methyluridine-3'-phosphate 5'phosphate
  modified_base 2: mod_base = OTHER; note = 2'-deoxy-2'-fluoroadenosine-3'-phosphate
  modified_base 3: mod_base = OTHER; note = 2'-O-methylguanosine-3'-phosphate
  modified_base 4: mod_base = OTHER; note = 2'-O-methyluridine-3'-phosphate
  modified_base 5: mod_base = OTHER; note = 2'-O-methyluridine-3'-phosphate
  modified_base 6: mod_base = OTHER; note = 2'-deoxy-2'-fluorouridine-3'-phosphate
  modified_base 7: mod_base = OTHER; note = 2'-O-methyluridine-3'-phosphate
  modified_base 8: mod_base = OTHER; note = 2'-O-methylcytidine-3'-phosphate
  modified_base 9: mod_base = OTHER; note = 2'-O-methyladenosine-3'-phosphate
  modified_base 10: mod_base = OTHER; note = 2'-O-methyluridine-3'-phosphate
  modified_base 11: mod_base = OTHER; note = 2'-O-methylcytidine-3'-phosphate
  modified_base 12: mod_base = OTHER; note = 2'-O-methylcytidine-3'-phosphate
  modified_base 13: mod_base = OTHER; note = 2'-O-methyladenosine-3'-phosphate
  modified_base 14: mod_base = OTHER; note = 2'-deoxy-2'-fluoroadenosine-3'-phosphate
  modified_base 15: mod_base = OTHER; note = 2'-O-methyladenosine-3'-phosphate
  modified_base 16: mod_base = OTHER; note = 2'-deoxy-2'-fluorouridine-3'-phosphate
  modified_base 17: mod_base = OTHER; note = 2'-O-methyluridine-3'-phosphate
  modified_base 18: mod_base = OTHER; note = 2'-O-methyluridine-3'-phosphate
  modified_base 19: mod_base = OTHER; note = 2'-O-methyluridine-3'-phosphate
  modified_base 20: mod_base = OTHER; note = 2'-O-methyluridine-3'-phosphate
  modified_base 21: mod_base = OTHER; note = 2'-O-methylguanosine-3'-phosphate
  modified_base 22: mod_base = OTHER; note = 2'-O-methylcytidine-3'-phosphate
  modified_base 23: mod_base = OTHER; note = 2'-O-methyladenosine
tagttttcatccaaatttttgca

SEQ ID NO: 4876 - RNA, 23 nt, synthetic construct
  source 1..23: mol_type = other RNA
  modified_base 1: mod_base = OTHER; note = 2'-O-methyluridine-3'-phosphate 5'phosphate
  modified_base 2: mod_base = OTHER; note = 2'-deoxy-2'-fluorouridine-3'-phosphate
  modified_base 3: mod_base = OTHER; note = 2'-O-methyladenosine-3'-phosphate
  modified_base 4: mod_base = OTHER; note = 2'-O-methylguanosine-3'-phosphate
  modified_base 5: mod_base = OTHER; note = 2'-O-methyluridine-3'-phosphate
  modified_base 6: mod_base = OTHER; note = 2'-deoxy-2'-fluorouridine-3'-phosphate
  modified_base 7: mod_base = OTHER; note = 2'-O-methyluridine-3'-phosphate
  modified_base 8: mod_base = OTHER; note = 2'-O-methyluridine-3'-phosphate
  modified_base 9: mod_base = OTHER; note = 2'-O-methylcytidine-3'-phosphate
  modified_base 10: mod_base = OTHER; note = 2'-O-methyladenosine-3'-phosphate
  modified_base 11: mod_base = OTHER; note = 2'-O-methyluridine-3'-phosphate
  modified_base 12: mod_base = OTHER; note = 2'-O-methylcytidine-3'-phosphate
  modified_base 13: mod_base = OTHER; note = 2'-O-methylcytidine-3'-phosphate
  modified_base 14: mod_base = OTHER; note = 2'-deoxy-2'-fluoroadenosine-3'-phosphate
  modified_base 15: mod_base = OTHER; note = 2'-O-methyladenosine-3'-phosphate
  modified_base 16: mod_base = OTHER; note = 2'-deoxy-2'-fluoroadenosine-3'-phosphate
  modified_base 17: mod_base = OTHER; note = 2'-O-methyluridine-3'-phosphate
  modified_base 18: mod_base = OTHER; note = 2'-O-methyluridine-3'-phosphate
  modified_base 19: mod_base = OTHER; note = 2'-O-methyluridine-3'-phosphate
  modified_base 20: mod_base = OTHER; note = 2'-O-methyluridine-3'-phosphate
  modified_base 21: mod_base = OTHER; note = 2'-O-methyluridine-3'-phosphate
  modified_base 22: mod_base = OTHER; note = 2'-O-methylguanosine-3'-phosphate
  modified_base 23: mod_base = OTHER; note = 2'-O-methylcytidine
ttagttttcatccaaatttttgc

SEQ ID NO: 4877 - RNA, 23 nt, synthetic construct
  source 1..23: mol_type = other RNA
  modified_base 1: mod_base = OTHER; note = 2'-O-methyluridine-3'-phosphate 5'phosphate
  modified_base 2: mod_base = OTHER; note = 2'-deoxy-2'-fluoroguanosine-3'-phosphate
  modified_base 3: mod_base = OTHER; note = 2'-O-methyluridine-3'-phosphate
  modified_base 4: mod_base = OTHER; note = 2'-O-methyladenosine-3'-phosphate
  modified_base 5: mod_base = OTHER; note = 2'-O-methylguanosine-3'-phosphate
  modified_base 6: mod_base = OTHER; note = 2'-deoxy-2'-fluorouridine-3'-phosphate
  modified_base 7: mod_base = OTHER; note = 2'-O-methyluridine-3'-phosphate
  modified_base 8: mod_base = OTHER; note = 2'-O-methyluridine-3'-phosphate
  modified_base 9: mod_base = OTHER; note = 2'-O-methyluridine-3'-phosphate
  modified_base 10: mod_base = OTHER; note = 2'-O-methylcytidine-3'-phosphate
  modified_base 11: mod_base = OTHER; note = 2'-O-methyladenosine-3'-phosphate
  modified_base 12: mod_base = OTHER; note = 2'-O-methyluridine-3'-phosphate
  modified_base 13: mod_base = OTHER; note = 2'-O-methylcytidine-3'-phosphate
  modified_base 14: mod_base = OTHER; note = 2'-deoxy-2'-fluorocytidine-3'-phosphate
  modified_base 15: mod_base = OTHER; note = 2'-O-methyladenosine-3'-phosphate
  modified_base 16: mod_base = OTHER; note = 2'-deoxy-2'-fluoroadenosine-3'-phosphate
  modified_base 17: mod_base = OTHER; note = 2'-O-methyladenosine-3'-phosphate
  modified_base 18: mod_base = OTHER; note = 2'-O-methyluridine-3'-phosphate
  modified_base 19: mod_base = OTHER; note = 2'-O-methyluridine-3'-phosphate
  modified_base 20: mod_base = OTHER; note = 2'-O-methyluridine-3'-phosphate
  modified_base 21: mod_base = OTHER; note = 2'-O-methyluridine-3'-phosphate
  modified_base 22: mod_base = OTHER; note = 2'-O-methyluridine-3'-phosphate
  modified_base 23: mod_base = OTHER; note = 2'-O-methylguanosine
tgtagttttcatccaaatttttg

SEQ ID NO: 4878 - RNA, 23 nt, synthetic construct
  source 1..23: mol_type = other RNA
  modified_base 1: mod_base = OTHER; note = 2'-O-methyluridine-3'-phosphate 5'phosphate
  modified_base 2: mod_base = OTHER; note = 2'-deoxy-2'-fluoroadenosine-3'-phosphate
  modified_base 3: mod_base = OTHER; note = 2'-O-methylguanosine-3'-phosphate
  modified_base 4: mod_base = OTHER; note = 2'-O-methyluridine-3'-phosphate
  modified_base 5: mod_base = OTHER; note = 2'-O-methyladenosine-3'-phosphate
  modified_base 6: mod_base = OTHER; note = 2'-deoxy-2'-fluoroguanosine-3'-phosphate
  modified_base 7: mod_base = OTHER; note = 2'-O-methyluridine-3'-phosphate
  modified_base 8: mod_base = OTHER; note = 2'-O-methyluridine-3'-phosphate
  modified_base 9: mod_base = OTHER; note = 2'-O-methyluridine-3'-phosphate
  modified_base 10: mod_base = OTHER; note = 2'-O-methyluridine-3'-phosphate
  modified_base 11: mod_base = OTHER; note = 2'-O-methylcytidine-3'-phosphate
  modified_base 12: mod_base = OTHER; note = 2'-O-methyladenosine-3'-phosphate
  modified_base 13: mod_base = OTHER; note = 2'-O-methyluridine-3'-phosphate
  modified_base 14: mod_base = OTHER; note = 2'-deoxy-2'-fluorocytidine-3'-phosphate
  modified_base 15: mod_base = OTHER; note = 2'-O-methylcytidine-3'-phosphate
  modified_base 16: mod_base = OTHER; note = 2'-deoxy-2'-fluoroadenosine-3'-phosphate
  modified_base 17: mod_base = OTHER; note = 2'-O-methyladenosine-3'-phosphate
  modified_base 18: mod_base = OTHER; note = 2'-O-methyladenosine-3'-phosphate
  modified_base 19: mod_base = OTHER; note = 2'-O-methyluridine-3'-phosphate
  modified_base 20: mod_base = OTHER; note = 2'-O-methyluridine-3'-phosphate
  modified_base 21: mod_base = OTHER; note = 2'-O-methyluridine-3'-phosphate
  modified_base 22: mod_base = OTHER; note = 2'-O-methyluridine-3'-phosphate
  modified_base 23: mod_base = OTHER; note = 2'-O-methyluridine
tagtagttttcatccaaattttt

SEQ ID NO: 4879 - RNA, 23 nt, synthetic construct
  source 1..23: mol_type = other RNA
  modified_base 1: mod_base = OTHER; note = 2'-O-methyluridine-3'-phosphate 5'phosphate
  modified_base 2: mod_base = OTHER; note = 2'-deoxy-2'-fluorocytidine-3'-phosphate
  modified_base 3: mod_base = OTHER; note = 2'-O-methyladenosine-3'-phosphate
  modified_base 4: mod_base = OTHER; note = 2'-O-methylguanosine-3'-phosphate
  modified_base 5: mod_base = OTHER; note = 2'-O-methyluridine-3'-phosphate
  modified_base 6: mod_base = OTHER; note = 2'-deoxy-2'-fluoroadenosine-3'-phosphate
  modified_base 7: mod_base = OTHER; note = 2'-O-methylguanosine-3'-phosphate
  modified_base 8: mod_base = OTHER; note = 2'-O-methyluridine-3'-phosphate
  modified_base 9: mod_base = OTHER; note = 2'-O-methyluridine-3'-phosphate
  modified_base 10: mod_base = OTHER; note = 2'-O-methyluridine-3'-phosphate
  modified_base 11: mod_base = OTHER; note = 2'-O-methyluridine-3'-phosphate
  modified_base 12: mod_base = OTHER; note = 2'-O-methylcytidine-3'-phosphate
  modified_base 13: mod_base = OTHER; note = 2'-O-methyladenosine-3'-phosphate
  modified_base 14: mod_base = OTHER; note = 2'-deoxy-2'-fluorouridine-3'-phosphate
  modified_base 15: mod_base = OTHER; note = 2'-O-methylcytidine-3'-phosphate
  modified_base 16: mod_base = OTHER; note = 2'-deoxy-2'-fluorocytidine-3'-phosphate
  modified_base 17: mod_base = OTHER; note = 2'-O-methyladenosine-3'-phosphate
  modified_base 18: mod_base = OTHER; note = 2'-O-methyladenosine-3'-phosphate
  modified_base 19: mod_base = OTHER; note = 2'-O-methyladenosine-3'-phosphate
  modified_base 20: mod_base = OTHER; note = 2'-O-methyluridine-3'-phosphate
  modified_base 21: mod_base = OTHER; note = 2'-O-methyluridine-3'-phosphate
  modified_base 22: mod_base = OTHER; note = 2'-O-methyluridine-3'-phosphate
  modified_base 23: mod_base = OTHER; note = 2'-O-methyluridine
tcagtagttttcatccaaatttt

SEQ ID NO: 4880 - RNA, 23 nt, synthetic construct
  source 1..23: mol_type = other RNA
  modified_base 1: mod_base = OTHER; note = 2'-O-methyluridine-3'-phosphate 5'phosphate
  modified_base 2: mod_base = OTHER; note = 2'-deoxy-2'-fluoroguanosine-3'-phosphate
  modified_base 3: mod_base = OTHER; note = 2'-O-methylcytidine-3'-phosphate
  modified_base 4: mod_base = OTHER; note = 2'-O-methyladenosine-3'-phosphate
  modified_base 5: mod_base = OTHER; note = 2'-O-methylguanosine-3'-phosphate
  modified_base 6: mod_base = OTHER; note = 2'-deoxy-2'-fluorouridine-3'-phosphate
  modified_base 7: mod_base = OTHER; note = 2'-O-methyladenosine-3'-phosphate
  modified_base 8: mod_base = OTHER; note = 2'-O-methylguanosine-3'-phosphate
  modified_base 9: mod_base = OTHER; note = 2'-O-methyluridine-3'-phosphate
  modified_base 10: mod_base = OTHER; note = 2'-O-methyluridine-3'-phosphate
  modified_base 11: mod_base = OTHER; note = 2'-O-methyluridine-3'-phosphate
  modified_base 12: mod_base = OTHER; note = 2'-O-methyluridine-3'-phosphate
  modified_base 13: mod_base = OTHER; note = 2'-O-methylcytidine-3'-phosphate
  modified_base 14: mod_base = OTHER; note = 2'-deoxy-2'-fluoroadenosine-3'-phosphate
  modified_base 15: mod_base = OTHER; note = 2'-O-methyluridine-3'-phosphate
  modified_base 16: mod_base = OTHER; note = 2'-deoxy-2'-fluorocytidine-3'-phosphate
  modified_base 17: mod_base = OTHER; note = 2'-O-methylcytidine-3'-phosphate
  modified_base 18: mod_base = OTHER; note = 2'-O-methyladenosine-3'-phosphate
  modified_base 19: mod_base = OTHER; note = 2'-O-methyladenosine-3'-phosphate
  modified_base 20: mod_base = OTHER; note = 2'-O-methyladenosine-3'-phosphate
  modified_base 21: mod_base = OTHER; note = 2'-O-methyluridine-3'-phosphate
  modified_base 22: mod_base = OTHER; note = 2'-O-methyluridine-3'-phosphate
  modified_base 23: mod_base = OTHER; note = 2'-O-methyluridine
tgcagtagttttcatccaaattt

SEQ ID NO: 4881 - RNA, 23 nt, synthetic construct
  source 1..23: mol_type = other RNA
  modified_base 1: mod_base = OTHER; note = 2'-O-methyluridine-3'-phosphate 5'phosphate
  modified_base 2: mod_base = OTHER; note = 2'-deoxy-2'-fluoroguanosine-3'-phosphate
  modified_base 3: mod_base = OTHER; note = 2'-O-methylguanosine-3'-phosphate
  modified_base 4: mod_base = OTHER; note = 2'-O-methylcytidine-3'-phosphate
  modified_base 5: mod_base = OTHER; note = 2'-O-methyladenosine-3'-phosphate
  modified_base 6: mod_base = OTHER; note = 2'-deoxy-2'-fluoroguanosine-3'-phosphate
  modified_base 7: mod_base = OTHER; note = 2'-O-methyluridine-3'-phosphate
  modified_base 8: mod_base = OTHER; note = 2'-O-methyladenosine-3'-phosphate
  modified_base 9: mod_base = OTHER; note = 2'-O-methylguanosine-3'-phosphate
  modified_base 10: mod_base = OTHER; note = 2'-O-methyluridine-3'-phosphate
  modified_base 11: mod_base = OTHER; note = 2'-O-methyluridine-3'-phosphate
  modified_base 12: mod_base = OTHER; note = 2'-O-methyluridine-3'-phosphate
  modified_base 13: mod_base = OTHER; note = 2'-O-methyluridine-3'-phosphate
  modified_base 14: mod_base = OTHER; note = 2'-deoxy-2'-fluorocytidine-3'-phosphate
  modified_base 15: mod_base = OTHER; note = 2'-O-methyladenosine-3'-phosphate
  modified_base 16: mod_base = OTHER; note = 2'-deoxy-2'-fluorouridine-3'-phosphate
  modified_base 17: mod_base = OTHER; note = 2'-O-methylcytidine-3'-phosphate
  modified_base 18: mod_base = OTHER; note = 2'-O-methylcytidine-3'-phosphate
  modified_base 19: mod_base = OTHER; note = 2'-O-methyladenosine-3'-phosphate
  modified_base 20: mod_base = OTHER; note = 2'-O-methyladenosine-3'-phosphate
  modified_base 21: mod_base = OTHER; note = 2'-O-methyladenosine-3'-phosphate
  modified_base 22: mod_base = OTHER; note = 2'-O-methyluridine-3'-phosphate
  modified_base 23: mod_base = OTHER; note = 2'-O-methyluridine
tggcagtagttttcatccaaatt

SEQ ID NO: 4882 - RNA, 23 nt, synthetic construct
  source 1..23: mol_type = other RNA
  modified_base 1: mod_base = OTHER; note = 2'-O-methyluridine-3'-phosphate 5'phosphate
  modified_base 2: mod_base = OTHER; note = 2'-deoxy-2'-fluorocytidine-3'-phosphate
  modified_base 3: mod_base = OTHER; note = 2'-O-methylguanosine-3'-phosphate
  modified_base 4: mod_base = OTHER; note = 2'-O-methylguanosine-3'-phosphate
  modified_base 5: mod_base = OTHER; note = 2'-O-methylcytidine-3'-phosphate
  modified_base 6: mod_base = OTHER; note = 2'-deoxy-2'-fluoroadenosine-3'-phosphate
  modified_base 7: mod_base = OTHER; note = 2'-O-methylguanosine-3'-phosphate
  modified_base 8: mod_base = OTHER; note = 2'-O-methyluridine-3'-phosphate
  modified_base 9: mod_base = OTHER; note = 2'-O-methyladenosine-3'-phosphate
  modified_base 10: mod_base = OTHER; note = 2'-O-methylguanosine-3'-phosphate
  modified_base 11: mod_base = OTHER; note = 2'-O-methyluridine-3'-phosphate
  modified_base 12: mod_base = OTHER; note = 2'-O-methyluridine-3'-phosphate
  modified_base 13: mod_base = OTHER; note = 2'-O-methyluridine-3'-phosphate
  modified_base 14: mod_base = OTHER; note = 2'-deoxy-2'-fluorouridine-3'-phosphate
  modified_base 15: mod_base = OTHER; note = 2'-O-methylcytidine-3'-phosphate
  modified_base 16: mod_base = OTHER; note = 2'-deoxy-2'-fluoroadenosine-3'-phosphate
  modified_base 17: mod_base = OTHER; note = 2'-O-methyluridine-3'-phosphate
  modified_base 18: mod_base = OTHER; note = 2'-O-methylcytidine-3'-phosphate
  modified_base 19: mod_base = OTHER; note = 2'-O-methylcytidine-3'-phosphate
  modified_base 20: mod_base = OTHER; note = 2'-O-methyladenosine-3'-phosphate
  modified_base 21: mod_base = OTHER; note = 2'-O-methyladenosine-3'-phosphate
  modified_base 22: mod_base = OTHER; note = 2'-O-methyladenosine-3'-phosphate
  modified_base 23: mod_base = OTHER; note = 2'-O-methyluridine
tcggcagtagttttcatccaaat

SEQ ID NO: 4883 - RNA, 23 nt, synthetic construct
  source 1..23: mol_type = other RNA
  modified_base 1: mod_base = OTHER; note = 2'-O-methyluridine-3'-phosphate 5'phosphate
  modified_base 2: mod_base = OTHER; note = 2'-deoxy-2'-fluoroguanosine-3'-phosphate
  modified_base 3: mod_base = OTHER; note = 2'-O-methylcytidine-3'-phosphate
  modified_base 4: mod_base = OTHER; note = 2'-O-methylguanosine-3'-phosphate
  modified_base 5: mod_base = OTHER; note = 2'-O-methylguanosine-3'-phosphate
  modified_base 6: mod_base = OTHER; note = 2'-deoxy-2'-fluorocytidine-3'-phosphate
  modified_base 7: mod_base = OTHER; note = 2'-O-methyladenosine-3'-phosphate
  modified_base 8: mod_base = OTHER; note = 2'-O-methylguanosine-3'-phosphate
  modified_base 9: mod_base = OTHER; note = 2'-O-methyluridine-3'-phosphate
  modified_base 10: mod_base = OTHER; note = 2'-O-methyladenosine-3'-phosphate
  modified_base 11: mod_base = OTHER; note = 2'-O-methylguanosine-3'-phosphate
  modified_base 12: mod_base = OTHER; note = 2'-O-methyluridine-3'-phosphate
  modified_base 13: mod_base = OTHER; note = 2'-O-methyluridine-3'-phosphate
  modified_base 14: mod_base = OTHER; note = 2'-deoxy-2'-fluorouridine-3'-phosphate
  modified_base 15: mod_base = OTHER; note = 2'-O-methyluridine-3'-phosphate
  modified_base 16: mod_base = OTHER; note = 2'-deoxy-2'-fluorocytidine-3'-phosphate
  modified_base 17: mod_base = OTHER; note = 2'-O-methyladenosine-3'-phosphate
  modified_base 18: mod_base = OTHER; note = 2'-O-methyluridine-3'-phosphate
  modified_base 19: mod_base = OTHER; note = 2'-O-methylcytidine-3'-phosphate
  modified_base 20: mod_base = OTHER; note = 2'-O-methylcytidine-3'-phosphate
  modified_base 21: mod_base = OTHER; note = 2'-O-methyladenosine-3'-phosphate
  modified_base 22: mod_base = OTHER; note = 2'-O-methyladenosine-3'-phosphate
  modified_base 23: mod_base = OTHER; note = 2'-O-methyladenosine
tgcggcagtagttttcatccaaa

SEQ ID NO: 4884 - RNA, 23 nt, synthetic construct
  source 1..23: mol_type = other RNA
  modified_base 1: mod_base = OTHER; note = 2'-O-methyluridine-3'-phosphate 5'phosphate
  modified_base 2: mod_base = OTHER; note = 2'-deoxy-2'-fluorouridine-3'-phosphate
  modified_base 3: mod_base = OTHER; note = 2'-O-methylguanosine-3'-phosphate
  modified_base 4: mod_base = OTHER; note = 2'-O-methylcytidine-3'-phosphate
  modified_base 5: mod_base = OTHER; note = 2'-O-methylguanosine-3'-phosphate
  modified_base 6: mod_base = OTHER; note = 2'-deoxy-2'-fluoroguanosine-3'-phosphate
  modified_base 7: mod_base = OTHER; note = 2'-O-methylcytidine-3'-phosphate
  modified_base 8: mod_base = OTHER; note = 2'-O-methyladenosine-3'-phosphate
  modified_base 9: mod_base = OTHER; note = 2'-O-methylguanosine-3'-phosphate
  modified_base 10: mod_base = OTHER; note = 2'-O-methyluridine-3'-phosphate
  modified_base 11: mod_base = OTHER; note = 2'-O-methyladenosine-3'-phosphate
  modified_base 12: mod_base = OTHER; note = 2'-O-methylguanosine-3'-phosphate
  modified_base 13: mod_base = OTHER; note = 2'-O-methyluridine-3'-phosphate
  modified_base 14: mod_base = OTHER; note = 2'-deoxy-2'-fluorouridine-3'-phosphate
  modified_base 15: mod_base = OTHER; note = 2'-O-methyluridine-3'-phosphate
  modified_base 16: mod_base = OTHER; note = 2'-deoxy-2'-fluorouridine-3'-phosphate
  modified_base 17: mod_base = OTHER; note = 2'-O-methylcytidine-3'-phosphate
  modified_base 18: mod_base = OTHER; note = 2'-O-methyladenosine-3'-phosphate
  modified_base 19: mod_base = OTHER; note = 2'-O-methyluridine-3'-phosphate
  modified_base 20: mod_base = OTHER; note = 2'-O-methylcytidine-3'-phosphate
  modified_base 21: mod_base = OTHER; note = 2'-O-methylcytidine-3'-phosphate
  modified_base 22: mod_base = OTHER; note = 2'-O-methyladenosine-3'-phosphate
  modified_base 23: mod_base = OTHER; note = 2'-O-methyladenosine
ttgcggcagtagttttcatccaa

SEQ ID NO: 4885 - RNA, 23 nt, synthetic construct
  source 1..23: mol_type = other RNA
  modified_base 1: mod_base = OTHER; note = 2'-O-methyluridine-3'-phosphate 5'phosphate
  modified_base 2: mod_base = OTHER; note = 2'-deoxy-2'-fluorouridine-3'-phosphate
  modified_base 3: mod_base = OTHER; note = 2'-O-methyluridine-3'-phosphate
  modified_base 4: mod_base = OTHER; note = 2'-O-methylguanosine-3'-phosphate
  modified_base 5: mod_base = OTHER; note = 2'-O-methylcytidine-3'-phosphate
  modified_base 6: mod_base = OTHER; note = 2'-deoxy-2'-fluoroguanosine-3'-phosphate
  modified_base 7: mod_base = OTHER; note = 2'-O-methylguanosine-3'-phosphate
  modified_base 8: mod_base = OTHER; note = 2'-O-methylcytidine-3'-phosphate
  modified_base 9: mod_base = OTHER; note = 2'-O-methyladenosine-3'-phosphate
  modified_base 10: mod_base = OTHER; note = 2'-O-methylguanosine-3'-phosphate
  modified_base 11: mod_base = OTHER; note = 2'-O-methyluridine-3'-phosphate
  modified_base 12: mod_base = OTHER; note = 2'-O-methyladenosine-3'-phosphate
  modified_base 13: mod_base = OTHER; note = 2'-O-methylguanosine-3'-phosphate
  modified_base 14: mod_base = OTHER; note = 2'-deoxy-2'-fluorouridine-3'-phosphate
  modified_base 15: mod_base = OTHER; note = 2'-O-methyluridine-3'-phosphate
  modified_base 16: mod_base = OTHER; note = 2'-deoxy-2'-fluorouridine-3'-phosphate
  modified_base 17: mod_base = OTHER; note = 2'-O-methyluridine-3'-phosphate
  modified_base 18: mod_base = OTHER; note = 2'-O-methylcytidine-3'-phosphate
  modified_base 19: mod_base = OTHER; note = 2'-O-methyladenosine-3'-phosphate
  modified_base 20: mod_base = OTHER; note = 2'-O-methyluridine-3'-phosphate
  modified_base 21: mod_base = OTHER; note = 2'-O-methylcytidine-3'-phosphate
  modified_base 22: mod_base = OTHER; note = 2'-O-methylcytidine-3'-phosphate
  modified_base 23: mod_base = OTHER; note = 2'-O-methyladenosine
tttgcggcagtagttttcatcca

SEQ ID NO: 4886 - RNA, 23 nt, synthetic construct
  source 1..23: mol_type = other RNA
  modified_base 1: mod_base = OTHER; note = 2'-O-methyluridine-3'-phosphate 5'phosphate
  modified_base 2: mod_base = OTHER; note = 2'-deoxy-2'-fluoroadenosine-3'-phosphate
  modified_base 3: mod_base = OTHER; note = 2'-O-methyluridine-3'-phosphate
  modified_base 4: mod_base = OTHER; note = 2'-O-methyluridine-3'-phosphate
  modified_base 5: mod_base = OTHER; note = 2'-O-methylguanosine-3'-phosphate
  modified_base 6: mod_base = OTHER; note = 2'-deoxy-2'-fluorocytidine-3'-phosphate
  modified_base 7: mod_base = OTHER; note = 2'-O-methylguanosine-3'-phosphate
  modified_base 8: mod_base = OTHER; note = 2'-O-methylguanosine-3'-phosphate
  modified_base 9: mod_base = OTHER; note = 2'-O-methylcytidine-3'-phosphate
  modified_base 10: mod_base = OTHER; note = 2'-O-methyladenosine-3'-phosphate
  modified_base 11: mod_base = OTHER; note = 2'-O-methylguanosine-3'-phosphate
  modified_base 12: mod_base = OTHER; note = 2'-O-methyluridine-3'-phosphate
  modified_base 13: mod_base = OTHER; note = 2'-O-methyladenosine-3'-phosphate
  modified_base 14: mod_base = OTHER; note = 2'-deoxy-2'-fluoroguanosine-3'-phosphate
  modified_base 15: mod_base = OTHER; note = 2'-O-methyluridine-3'-phosphate
  modified_base 16: mod_base = OTHER; note = 2'-deoxy-2'-fluorouridine-3'-phosphate
  modified_base 17: mod_base = OTHER; note = 2'-O-methyluridine-3'-phosphate
  modified_base 18: mod_base = OTHER; note = 2'-O-methyluridine-3'-phosphate
  modified_base 19: mod_base = OTHER; note = 2'-O-methylcytidine-3'-phosphate
  modified_base 20: mod_base = OTHER; note = 2'-O-methyladenosine-3'-phosphate
  modified_base 21: mod_base = OTHER; note = 2'-O-methyluridine-3'-phosphate
  modified_base 22: mod_base = OTHER; note = 2'-O-methylcytidine-3'-phosphate
  modified_base 23: mod_base = OTHER; note = 2'-O-methylcytidine
tattgcggcagtagttttcatcc

SEQ ID NO: 4887 - RNA, 23 nt, synthetic construct
  source 1..23: mol_type = other RNA
  modified_base 1: mod_base = OTHER; note = 2'-O-methyluridine-3'-phosphate 5'phosphate
  modified_base 2: mod_base = OTHER; note = 2'-deoxy-2'-fluoroguanosine-3'-phosphate
  modified_base 3: mod_base = OTHER; note = 2'-O-methyladenosine-3'-phosphate
  modified_base 4: mod_base = OTHER; note = 2'-O-methyluridine-3'-phosphate
  modified_base 5: mod_base = OTHER; note = 2'-O-methyluridine-3'-phosphate
  modified_base 6: mod_base = OTHER; note = 2'-deoxy-2'-fluoroguanosine-3'-phosphate
  modified_base 7: mod_base = OTHER; note = 2'-O-methylcytidine-3'-phosphate
  modified_base 8: mod_base = OTHER; note = 2'-O-methylguanosine-3'-phosphate
  modified_base 9: mod_base = OTHER; note = 2'-O-methylguanosine-3'-phosphate
  modified_base 10: mod_base = OTHER; note = 2'-O-methylcytidine-3'-phosphate
  modified_base 11: mod_base = OTHER; note = 2'-O-methyladenosine-3'-phosphate
  modified_base 12: mod_base = OTHER; note = 2'-O-methylguanosine-3'-phosphate
  modified_base 13: mod_base = OTHER; note = 2'-O-methyluridine-3'-phosphate
  modified_base 14: mod_base = OTHER; note = 2'-deoxy-2'-fluoroadenosine-3'-phosphate
  modified_base 15: mod_base = OTHER; note = 2'-O-methylguanosine-3'-phosphate
  modified_base 16: mod_base = OTHER; note = 2'-deoxy-2'-fluorouridine-3'-phosphate
  modified_base 17: mod_base = OTHER; note = 2'-O-methyluridine-3'-phosphate
  modified_base 18: mod_base = OTHER; note = 2'-O-methyluridine-3'-phosphate
  modified_base 19: mod_base = OTHER; note = 2'-O-methyluridine-3'-phosphate
  modified_base 20: mod_base = OTHER; note = 2'-O-methylcytidine-3'-phosphate
  modified_base 21: mod_base = OTHER; note = 2'-O-methyladenosine-3'-phosphate
  modified_base 22: mod_base = OTHER; note = 2'-O-methyluridine-3'-phosphate
  modified_base 23: mod_base = OTHER; note = 2'-O-methylcytidine
tgattgcggcagtagttttcatc

SEQ ID NO: 4888 - RNA, 23 nt, synthetic construct
  source 1..23: mol_type = other RNA
  modified_base 1: mod_base = OTHER; note = 2'-O-methyluridine-3'-phosphate 5'phosphate
  modified_base 2: mod_base = OTHER; note = 2'-deoxy-2'-fluoroguanosine-3'-phosphate
  modified_base 3: mod_base = OTHER; note = 2'-O-methylguanosine-3'-phosphate
  modified_base 4: mod_base = OTHER; note = 2'-O-methyladenosine-3'-phosphate
  modified_base 5: mod_base = OTHER; note = 2'-O-methyluridine-3'-phosphate
  modified_base 6: mod_base = OTHER; note = 2'-deoxy-2'-fluorouridine-3'-phosphate
  modified_base 7: mod_base = OTHER; note = 2'-O-methylguanosine-3'-phosphate
  modified_base 8: mod_base = OTHER; note = 2'-O-methylcytidine-3'-phosphate
  modified_base 9: mod_base = OTHER; note = 2'-O-methylguanosine-3'-phosphate
  modified_base 10: mod_base = OTHER; note = 2'-O-methylguanosine-3'-phosphate
  modified_base 11: mod_base = OTHER; note = 2'-O-methylcytidine-3'-phosphate
  modified_base 12: mod_base = OTHER; note = 2'-O-methyladenosine-3'-phosphate
  modified_base 13: mod_base = OTHER; note = 2'-O-methylguanosine-3'-phosphate
  modified_base 14: mod_base = OTHER; note = 2'-deoxy-2'-fluorouridine-3'-phosphate
  modified_base 15: mod_base = OTHER; note = 2'-O-methyladenosine-3'-phosphate
  modified_base 16: mod_base = OTHER; note = 2'-deoxy-2'-fluoroguanosine-3'-phosphate
  modified_base 17: mod_base = OTHER; note = 2'-O-methyluridine-3'-phosphate
  modified_base 18: mod_base = OTHER; note = 2'-O-methyluridine-3'-phosphate
  modified_base 19: mod_base = OTHER; note = 2'-O-methyluridine-3'-phosphate
  modified_base 20: mod_base = OTHER; note = 2'-O-methyluridine-3'-phosphate
  modified_base 21: mod_base = OTHER; note = 2'-O-methylcytidine-3'-phosphate
  modified_base 22: mod_base = OTHER; note = 2'-O-methyladenosine-3'-phosphate
  modified_base 23: mod_base = OTHER; note = 2'-O-methyluridine
tggattgcggcagtagttttcat

SEQ ID NO: 4889 - RNA, 23 nt, synthetic construct
  source 1..23: mol_type = other RNA
  modified_base 1: mod_base = OTHER; note = 2'-O-methyluridine-3'-phosphate 5'phosphate
  modified_base 2: mod_base = OTHER; note = 2'-deoxy-2'-fluoroadenosine-3'-phosphate
  modified_base 3: mod_base = OTHER; note = 2'-O-methylguanosine-3'-phosphate
  modified_base 4: mod_base = OTHER; note = 2'-O-methylguanosine-3'-phosphate
  modified_base 5: mod_base = OTHER; note = 2'-O-methyladenosine-3'-phosphate
  modified_base 6: mod_base = OTHER; note = 2'-deoxy-2'-fluorouridine-3'-phosphate
  modified_base 7: mod_base = OTHER; note = 2'-O-methyluridine-3'-phosphate
  modified_base 8: mod_base = OTHER; note = 2'-O-methylguanosine-3'-phosphate
  modified_base 9: mod_base = OTHER; note = 2'-O-methylcytidine-3'-phosphate
  modified_base 10: mod_base = OTHER; note = 2'-O-methylguanosine-3'-phosphate
  modified_base 11: mod_base = OTHER; note = 2'-O-methylguanosine-3'-phosphate
  modified_base 12: mod_base = OTHER; note = 2'-O-methylcytidine-3'-phosphate
  modified_base 13: mod_base = OTHER; note = 2'-O-methyladenosine-3'-phosphate
  modified_base 14: mod_base = OTHER; note = 2'-deoxy-2'-fluoroguanosine-3'-phosphate
  modified_base 15: mod_base = OTHER; note = 2'-O-methyluridine-3'-phosphate
  modified_base 16: mod_base = OTHER; note = 2'-deoxy-2'-fluoroadenosine-3'-phosphate
  modified_base 17: mod_base = OTHER; note = 2'-O-methylguanosine-3'-phosphate
  modified_base 18: mod_base = OTHER; note = 2'-O-methyluridine-3'-phosphate
  modified_base 19: mod_base = OTHER; note = 2'-O-methyluridine-3'-phosphate
  modified_base 20: mod_base = OTHER; note = 2'-O-methyluridine-3'-phosphate
  modified_base 21: mod_base = OTHER; note = 2'-O-methyluridine-3'-phosphate
  modified_base 22: mod_base = OTHER; note = 2'-O-methylcytidine-3'-phosphate
  modified_base 23: mod_base = OTHER; note = 2'-O-methyladenosine
taggattgcggcagtagttttca

SEQ ID NO: 4890 - RNA, 23 nt, synthetic construct
  source 1..23: mol_type = other RNA
  modified_base 1: mod_base = OTHER; note = 2'-O-methyluridine-3'-phosphate 5'phosphate
  modified_base 2: mod_base = OTHER; note = 2'-deoxy-2'-fluorocytidine-3'-phosphate
  modified_base 3: mod_base = OTHER; note = 2'-O-methyladenosine-3'-phosphate
  modified_base 4: mod_base = OTHER; note = 2'-O-methylguanosine-3'-phosphate
  modified_base 5: mod_base = OTHER; note = 2'-O-methylguanosine-3'-phosphate
  modified_base 6: mod_base = OTHER; note = 2'-deoxy-2'-fluoroadenosine-3'-phosphate
  modified_base 7: mod_base = OTHER; note = 2'-O-methyluridine-3'-phosphate
  modified_base 8: mod_base = OTHER; note = 2'-O-methyluridine-3'-phosphate
  modified_base 9: mod_base = OTHER; note = 2'-O-methylguanosine-3'-phosphate
  modified_base 10: mod_base = OTHER; note = 2'-O-methylcytidine-3'-phosphate
  modified_base 11: mod_base = OTHER; note = 2'-O-methylguanosine-3'-phosphate
  modified_base 12: mod_base = OTHER; note = 2'-O-methylguanosine-3'-phosphate
  modified_base 13: mod_base = OTHER; note = 2'-O-methylcytidine-3'-phosphate
  modified_base 14: mod_base = OTHER; note = 2'-deoxy-2'-fluoroadenosine-3'-phosphate
  modified_base 15: mod_base = OTHER; note = 2'-O-methylguanosine-3'-phosphate
  modified_base 16: mod_base = OTHER; note = 2'-deoxy-2'-fluorouridine-3'-phosphate
  modified_base 17: mod_base = OTHER; note = 2'-O-methyladenosine-3'-phosphate
  modified_base 18: mod_base = OTHER; note = 2'-O-methylguanosine-3'-phosphate
  modified_base 19: mod_base = OTHER; note = 2'-O-methyluridine-3'-phosphate
  modified_base 20: mod_base = OTHER; note = 2'-O-methyluridine-3'-phosphate
  modified_base 21: mod_base = OTHER; note = 2'-O-methyluridine-3'-phosphate
  modified_base 22: mod_base = OTHER; note = 2'-O-methyluridine-3'-phosphate
  modified_base 23: mod_base = OTHER; note = 2'-O-methylcytidine
tcaggattgcggcagtagttttc

SEQ ID NO: 4891 - RNA, 23 nt, synthetic construct
  source 1..23: mol_type = other RNA
  modified_base 1: mod_base = OTHER; note = 2'-O-methyluridine-3'-phosphate 5'phosphate
  modified_base 2: mod_base = OTHER; note = 2'-deoxy-2'-fluorouridine-3'-phosphate
  modified_base 3: mod_base = OTHER; note = 2'-O-methylcytidine-3'-phosphate
  modified_base 4: mod_base = OTHER; note = 2'-O-methyladenosine-3'-phosphate
  modified_base 5: mod_base = OTHER; note = 2'-O-methylguanosine-3'-phosphate
  modified_base 6: mod_base = OTHER; note = 2'-deoxy-2'-fluoroguanosine-3'-phosphate
  modified_base 7: mod_base = OTHER; note = 2'-O-methyladenosine-3'-phosphate
  modified_base 8: mod_base = OTHER; note = 2'-O-methyluridine-3'-phosphate
  modified_base 9: mod_base = OTHER; note = 2'-O-methyluridine-3'-phosphate
  modified_base 10: mod_base = OTHER; note = 2'-O-methylguanosine-3'-phosphate
  modified_base 11: mod_base = OTHER; note = 2'-O-methylcytidine-3'-phosphate
  modified_base 12: mod_base = OTHER; note = 2'-O-methylguanosine-3'-phosphate
  modified_base 13: mod_base = OTHER; note = 2'-O-methylguanosine-3'-phosphate
  modified_base 14: mod_base = OTHER; note = 2'-deoxy-2'-fluorocytidine-3'-phosphate
  modified_base 15: mod_base = OTHER; note = 2'-O-methyladenosine-3'-phosphate
  modified_base 16: mod_base = OTHER; note = 2'-deoxy-2'-fluoroguanosine-3'-phosphate
  modified_base 17: mod_base = OTHER; note = 2'-O-methyluridine-3'-phosphate
  modified_base 18: mod_base = OTHER; note = 2'-O-methyladenosine-3'-phosphate
  modified_base 19: mod_base = OTHER; note = 2'-O-methylguanosine-3'-phosphate
  modified_base 20: mod_base = OTHER; note = 2'-O-methyluridine-3'-phosphate
  modified_base 21: mod_base = OTHER; note = 2'-O-methyluridine-3'-phosphate
  modified_base 22: mod_base = OTHER; note = 2'-O-methyluridine-3'-phosphate
  modified_base 23: mod_base = OTHER; note = 2'-O-methyluridine
ttcaggattgcggcagtagtttt

SEQ ID NO: 4892 - RNA, 23 nt, synthetic construct
  source 1..23: mol_type = other RNA
  modified_base 1: mod_base = OTHER; note = 2'-O-methyluridine-3'-phosphate 5'phosphate
  modified_base 2: mod_base = OTHER; note = 2'-deoxy-2'-fluorocytidine-3'-phosphate
  modified_base 3: mod_base = OTHER; note = 2'-O-methylcytidine-3'-phosphate
  modified_base 4: mod_base = OTHER; note = 2'-O-methylguanosine-3'-phosphate
  modified_base 5: mod_base = OTHER; note = 2'-O-methyluridine-3'-phosphate
  modified_base 6: mod_base = OTHER; note = 2'-deoxy-2'-fluorocytidine-3'-phosphate
  modified_base 7: mod_base = OTHER; note = 2'-O-methyladenosine-3'-phosphate
  modified_base 8: mod_base = OTHER; note = 2'-O-methylguanosine-3'-phosphate
  modified_base 9: mod_base = OTHER; note = 2'-O-methylguanosine-3'-phosphate
  modified_base 10: mod_base = OTHER; note = 2'-O-methyladenosine-3'-phosphate
  modified_base 11: mod_base = OTHER; note = 2'-O-methyluridine-3'-phosphate
  modified_base 12: mod_base = OTHER; note = 2'-O-methyluridine-3'-phosphate
  modified_base 13: mod_base = OTHER; note = 2'-O-methylguanosine-3'-phosphate
  modified_base 14: mod_base = OTHER; note = 2'-deoxy-2'-fluorocytidine-3'-phosphate
  modified_base 15: mod_base = OTHER; note = 2'-O-methylguanosine-3'-phosphate
  modified_base 16: mod_base = OTHER; note = 2'-deoxy-2'-fluoroguanosine-3'-phosphate
  modified_base 17: mod_base = OTHER; note = 2'-O-methylcytidine-3'-phosphate
  modified_base 18: mod_base = OTHER; note = 2'-O-methyladenosine-3'-phosphate
  modified_base 19: mod_base = OTHER; note = 2'-O-methylguanosine-3'-phosphate
  modified_base 20: mod_base = OTHER; note = 2'-O-methyluridine-3'-phosphate
  modified_base 21: mod_base = OTHER; note = 2'-O-methyladenosine-3'-phosphate
  modified_base 22: mod_base = OTHER; note = 2'-O-methylguanosine-3'-phosphate
  modified_base 23: mod_base = OTHER; note = 2'-O-methyluridine
tccgtcaggattgcggcagtagt

SEQ ID NO: 4893 - RNA, 23 nt, synthetic construct
  source 1..23: mol_type = other RNA
  modified_base 1: mod_base = OTHER; note = 2'-O-methyluridine-3'-phosphate 5'phosphate
  modified_base 2: mod_base = OTHER; note = 2'-deoxy-2'-fluorouridine-3'-phosphate
  modified_base 3: mod_base = OTHER; note = 2'-O-methylcytidine-3'-phosphate
  modified_base 4: mod_base = OTHER; note = 2'-O-methylcytidine-3'-phosphate
  modified_base 5: mod_base = OTHER; note = 2'-O-methylguanosine-3'-phosphate
  modified_base 6: mod_base = OTHER; note = 2'-deoxy-2'-fluorouridine-3'-phosphate
  modified_base 7: mod_base = OTHER; note = 2'-O-methylcytidine-3'-phosphate
  modified_base 8: mod_base = OTHER; note = 2'-O-methyladenosine-3'-phosphate
  modified_base 9: mod_base = OTHER; note = 2'-O-methylguanosine-3'-phosphate
  modified_base 10: mod_base = OTHER; note = 2'-O-methylguanosine-3'-phosphate
  modified_base 11: mod_base = OTHER; note = 2'-O-methyladenosine-3'-phosphate
  modified_base 12: mod_base = OTHER; note = 2'-O-methyluridine-3'-phosphate
  modified_base 13: mod_base = OTHER; note = 2'-O-methyluridine-3'-phosphate
  modified_base 14: mod_base = OTHER; note = 2'-deoxy-2'-fluoroguanosine-3'-phosphate
  modified_base 15: mod_base = OTHER; note = 2'-O-methylcytidine-3'-phosphate
  modified_base 16: mod_base = OTHER; note = 2'-deoxy-2'-fluoroguanosine-3'-phosphate
  modified_base 17: mod_base = OTHER; note = 2'-O-methylguanosine-3'-phosphate
  modified_base 18: mod_base = OTHER; note = 2'-O-methylcytidine-3'-phosphate
  modified_base 19: mod_base = OTHER; note = 2'-O-methyladenosine-3'-phosphate
  modified_base 20: mod_base = OTHER; note = 2'-O-methylguanosine-3'-phosphate
  modified_base 21: mod_base = OTHER; note = 2'-O-methyluridine-3'-phosphate
  modified_base 22: mod_base = OTHER; note = 2'-O-methyladenosine-3'-phosphate
  modified_base 23: mod_base = OTHER; note = 2'-O-methylguanosine
ttccgtcaggattgcggcagtag

SEQ ID NO: 4894 - RNA, 23 nt, synthetic construct
  source 1..23: mol_type = other RNA
  modified_base 1: mod_base = OTHER; note = 2'-O-methyluridine-3'-phosphate 5'phosphate
  modified_base 2: mod_base = OTHER; note = 2'-deoxy-2'-fluorouridine-3'-phosphate
  modified_base 3: mod_base = OTHER; note = 2'-O-methyluridine-3'-phosphate
  modified_base 4: mod_base = OTHER; note = 2'-O-methylcytidine-3'-phosphate
  modified_base 5: mod_base = OTHER; note = 2'-O-methylcytidine-3'-phosphate
  modified_base 6: mod_base = OTHER; note = 2'-deoxy-2'-fluoroguanosine-3'-phosphate
  modified_base 7: mod_base = OTHER; note = 2'-O-methyluridine-3'-phosphate
  modified_base 8: mod_base = OTHER; note = 2'-O-methylcytidine-3'-phosphate
  modified_base 9: mod_base = OTHER; note = 2'-O-methyladenosine-3'-phosphate
  modified_base 10: mod_base = OTHER; note = 2'-O-methylguanosine-3'-phosphate
  modified_base 11: mod_base = OTHER; note = 2'-O-methylguanosine-3'-phosphate
  modified_base 12: mod_base = OTHER; note = 2'-O-methyladenosine-3'-phosphate
  modified_base 13: mod_base = OTHER; note = 2'-O-methyluridine-3'-phosphate
  modified_base 14: mod_base = OTHER; note = 2'-deoxy-2'-fluorouridine-3'-phosphate
  modified_base 15: mod_base = OTHER; note = 2'-O-methylguanosine-3'-phosphate
  modified_base 16: mod_base = OTHER; note = 2'-deoxy-2'-fluorocytidine-3'-phosphate
  modified_base 17: mod_base = OTHER; note = 2'-O-methylguanosine-3'-phosphate
  modified_base 18: mod_base = OTHER; note = 2'-O-methylguanosine-3'-phosphate
  modified_base 19: mod_base = OTHER; note = 2'-O-methylcytidine-3'-phosphate
  modified_base 20: mod_base = OTHER; note = 2'-O-methyladenosine-3'-phosphate
  modified_base 21: mod_base = OTHER; note = 2'-O-methylguanosine-3'-phosphate
  modified_base 22: mod_base = OTHER; note = 2'-O-methyluridine-3'-phosphate
  modified_base 23: mod_base = OTHER; note = 2'-O-methyladenosine
tttccgtcaggattgcggcagta

SEQ ID NO: 4895 - RNA, 23 nt, synthetic construct
  source 1..23: mol_type = other RNA
  modified_base 1: mod_base = OTHER; note = 2'-O-methyluridine-3'-phosphate 5'phosphate
  modified_base 2: mod_base = OTHER; note = 2'-deoxy-2'-fluorouridine-3'-phosphate
  modified_base 3: mod_base = OTHER; note = 2'-O-methyluridine-3'-phosphate
  modified_base 4: mod_base = OTHER; note = 2'-O-methyluridine-3'-phosphate
  modified_base 5: mod_base = OTHER; note = 2'-O-methylcytidine-3'-phosphate
  modified_base 6: mod_base = OTHER; note = 2'-deoxy-2'-fluorocytidine-3'-phosphate
  modified_base 7: mod_base = OTHER; note = 2'-O-methylguanosine-3'-phosphate
  modified_base 8: mod_base = OTHER; note = 2'-O-methyluridine-3'-phosphate
  modified_base 9: mod_base = OTHER; note = 2'-O-methylcytidine-3'-phosphate
  modified_base 10: mod_base = OTHER; note = 2'-O-methyladenosine-3'-phosphate
  modified_base 11: mod_base = OTHER; note = 2'-O-methylguanosine-3'-phosphate
  modified_base 12: mod_base = OTHER; note = 2'-O-methylguanosine-3'-phosphate
  modified_base 13: mod_base = OTHER; note = 2'-O-methyladenosine-3'-phosphate
  modified_base 14: mod_base = OTHER; note = 2'-deoxy-2'-fluorouridine-3'-phosphate
  modified_base 15: mod_base = OTHER; note = 2'-O-methyluridine-3'-phosphate
  modified_base 16: mod_base = OTHER; note = 2'-deoxy-2'-fluoroguanosine-3'-phosphate
  modified_base 17: mod_base = OTHER; note = 2'-O-methylcytidine-3'-phosphate
  modified_base 18: mod_base = OTHER; note = 2'-O-methylguanosine-3'-phosphate
  modified_base 19: mod_base = OTHER; note = 2'-O-methylguanosine-3'-phosphate
  modified_base 20: mod_base = OTHER; note = 2'-O-methylcytidine-3'-phosphate
  modified_base 21: mod_base = OTHER; note = 2'-O-methyladenosine-3'-phosphate
  modified_base 22: mod_base = OTHER; note = 2'-O-methylguanosine-3'-phosphate
  modified_base 23: mod_base = OTHER; note = 2'-O-methyluridine
ttttccgtcaggattgcggcagt

SEQ ID NO: 4896 - RNA, 23 nt, synthetic construct
  source 1..23: mol_type = other RNA
  modified_base 1: mod_base = OTHER; note = 2'-O-methyluridine-3'-phosphate 5'phosphate
  modified_base 2: mod_base = OTHER; note = 2'-deoxy-2'-fluorouridine-3'-phosphate
  modified_base 3: mod_base = OTHER; note = 2'-O-methyluridine-3'-phosphate
  modified_base 4: mod_base = OTHER; note = 2'-O-methyluridine-3'-phosphate
  modified_base 5: mod_base = OTHER; note = 2'-O-methyluridine-3'-phosphate
  modified_base 6: mod_base = OTHER; note = 2'-deoxy-2'-fluorocytidine-3'-phosphate
  modified_base 7: mod_base = OTHER; note = 2'-O-methylcytidine-3'-phosphate
  modified_base 8: mod_base = OTHER; note = 2'-O-methylguanosine-3'-phosphate
  modified_base 9: mod_base = OTHER; note = 2'-O-methyluridine-3'-phosphate
  modified_base 10: mod_base = OTHER; note = 2'-O-methylcytidine-3'-phosphate
  modified_base 11: mod_base = OTHER; note = 2'-O-methyladenosine-3'-phosphate
  modified_base 12: mod_base = OTHER; note = 2'-O-methylguanosine-3'-phosphate
  modified_base 13: mod_base = OTHER; note = 2'-O-methylguanosine-3'-phosphate
  modified_base 14: mod_base = OTHER; note = 2'-deoxy-2'-fluoroadenosine-3'-phosphate
  modified_base 15: mod_base = OTHER; note = 2'-O-methyluridine-3'-phosphate
  modified_base 16: mod_base = OTHER; note = 2'-deoxy-2'-fluorouridine-3'-phosphate
  modified_base 17: mod_base = OTHER; note = 2'-O-methylguanosine-3'-phosphate
  modified_base 18: mod_base = OTHER; note = 2'-O-methylcytidine-3'-phosphate
  modified_base 19: mod_base = OTHER; note = 2'-O-methylguanosine-3'-phosphate
  modified_base 20: mod_base = OTHER; note = 2'-O-methylguanosine-3'-phosphate
  modified_base 21: mod_base = OTHER; note = 2'-O-methylcytidine-3'-phosphate
  modified_base 22: mod_base = OTHER; note = 2'-O-methyladenosine-3'-phosphate
  modified_base 23: mod_base = OTHER; note = 2'-O-methylguanosine
tttttccgtcaggattgcggcag

SEQ ID NO: 4897 - RNA, 23 nt, synthetic construct
  source 1..23: mol_type = other RNA
  modified_base 1: mod_base = OTHER; note = 2'-O-methyluridine-3'-phosphate 5'phosphate
  modified_base 2: mod_base = OTHER; note = 2'-deoxy-2'-fluorouridine-3'-phosphate
  modified_base 3: mod_base = OTHER; note = 2'-O-methyluridine-3'-phosphate
  modified_base 4: mod_base = OTHER; note = 2'-O-methyluridine-3'-phosphate
  modified_base 5: mod_base = OTHER; note = 2'-O-methyluridine-3'-phosphate
  modified_base 6: mod_base = OTHER; note = 2'-deoxy-2'-fluorouridine-3'-phosphate
  modified_base 7: mod_base = OTHER; note = 2'-O-methylcytidine-3'-phosphate
  modified_base 8: mod_base = OTHER; note = 2'-O-methylcytidine-3'-phosphate
  modified_base 9: mod_base = OTHER; note = 2'-O-methylguanosine-3'-phosphate
  modified_base 10: mod_base = OTHER; note = 2'-O-methyluridine-3'-phosphate
  modified_base 11: mod_base = OTHER; note = 2'-O-methylcytidine-3'-phosphate
  modified_base 12: mod_base = OTHER; note = 2'-O-methyladenosine-3'-phosphate
  modified_base 13: mod_base = OTHER; note = 2'-O-methylguanosine-3'-phosphate
  modified_base 14: mod_base = OTHER; note = 2'-deoxy-2'-fluoroguanosine-3'-phosphate
  modified_base 15: mod_base = OTHER; note = 2'-O-methyladenosine-3'-phosphate
  modified_base 16: mod_base = OTHER; note = 2'-deoxy-2'-fluorouridine-3'-phosphate
  modified_base 17: mod_base = OTHER; note = 2'-O-methyluridine-3'-phosphate
  modified_base 18: mod_base = OTHER; note = 2'-O-methylguanosine-3'-phosphate
  modified_base 19: mod_base = OTHER; note = 2'-O-methylcytidine-3'-phosphate
  modified_base 20: mod_base = OTHER; note = 2'-O-methylguanosine-3'-phosphate
  modified_base 21: mod_base = OTHER; note = 2'-O-methylguanosine-3'-phosphate
  modified_base 22: mod_base = OTHER; note = 2'-O-methylcytidine-3'-phosphate
  modified_base 23: mod_base = OTHER; note = 2'-O-methyladenosine
ttttttccgtcaggattgcggca

SEQ ID NO: 4898 - RNA, 23 nt, synthetic construct
  source 1..23: mol_type = other RNA
  modified_base 1: mod_base = OTHER; note = 2'-O-methyluridine-3'-phosphate 5'phosphate
  modified_base 2: mod_base = OTHER; note = 2'-deoxy-2'-fluorocytidine-3'-phosphate
  modified_base 3: mod_base = OTHER; note = 2'-O-methyluridine-3'-phosphate
  modified_base 4: mod_base = OTHER; note = 2'-O-methyluridine-3'-phosphate
  modified_base 5: mod_base = OTHER; note = 2'-O-methyluridine-3'-phosphate
  modified_base 6: mod_base = OTHER; note = 2'-deoxy-2'-fluorouridine-3'-phosphate
  modified_base 7: mod_base = OTHER; note = 2'-O-methyluridine-3'-phosphate
  modified_base 8: mod_base = OTHER; note = 2'-O-methylcytidine-3'-phosphate
  modified_base 9: mod_base = OTHER; note = 2'-O-methylcytidine-3'-phosphate
  modified_base 10: mod_base = OTHER; note = 2'-O-methylguanosine-3'-phosphate
  modified_base 11: mod_base = OTHER; note = 2'-O-methyluridine-3'-phosphate
  modified_base 12: mod_base = OTHER; note = 2'-O-methylcytidine-3'-phosphate
  modified_base 13: mod_base = OTHER; note = 2'-O-methyladenosine-3'-phosphate
  modified_base 14: mod_base = OTHER; note = 2'-deoxy-2'-fluoroguanosine-3'-phosphate
  modified_base 15: mod_base = OTHER; note = 2'-O-methylguanosine-3'-phosphate
  modified_base 16: mod_base = OTHER; note = 2'-deoxy-2'-fluoroadenosine-3'-phosphate
  modified_base 17: mod_base = OTHER; note = 2'-O-methyluridine-3'-phosphate
  modified_base 18: mod_base = OTHER; note = 2'-O-methyluridine-3'-phosphate
  modified_base 19: mod_base = OTHER; note = 2'-O-methylguanosine-3'-phosphate
  modified_base 20: mod_base = OTHER; note = 2'-O-methylcytidine-3'-phosphate
  modified_base 21: mod_base = OTHER; note = 2'-O-methylguanosine-3'-phosphate
  modified_base 22: mod_base = OTHER; note = 2'-O-methylguanosine-3'-phosphate
  modified_base 23: mod_base = OTHER; note = 2'-O-methylcytidine
tctttttccgtcaggattgcggc

SEQ ID NO: 4899 - RNA, 23 nt, synthetic construct
  source 1..23: mol_type = other RNA
  modified_base 1: mod_base = OTHER; note = 2'-O-methyluridine-3'-phosphate 5'phosphate
  modified_base 2: mod_base = OTHER; note = 2'-deoxy-2'-fluorocytidine-3'-phosphate
  modified_base 3: mod_base = OTHER; note = 2'-O-methylcytidine-3'-phosphate
  modified_base 4: mod_base = OTHER; note = 2'-O-methyluridine-3'-phosphate
  modified_base 5: mod_base = OTHER; note = 2'-O-methyluridine-3'-phosphate
  modified_base 6: mod_base = OTHER; note = 2'-deoxy-2'-fluorouridine-3'-phosphate
  modified_base 7: mod_base = OTHER; note = 2'-O-methyluridine-3'-phosphate
  modified_base 8: mod_base = OTHER; note = 2'-O-methyluridine-3'-phosphate
  modified_base 9: mod_base = OTHER; note = 2'-O-methylcytidine-3'-phosphate
  modified_base 10: mod_base = OTHER; note = 2'-O-methylcytidine-3'-phosphate
  modified_base 11: mod_base = OTHER; note = 2'-O-methylguanosine-3'-phosphate
  modified_base 12: mod_base = OTHER; note = 2'-O-methyluridine-3'-phosphate
  modified_base 13: mod_base = OTHER; note = 2'-O-methylcytidine-3'-phosphate
  modified_base 14: mod_base = OTHER; note = 2'-deoxy-2'-fluoroadenosine-3'-phosphate
  modified_base 15: mod_base = OTHER; note = 2'-O-methylguanosine-3'-phosphate
  modified_base 16: mod_base = OTHER; note = 2'-deoxy-2'-fluoroguanosine-3'-phosphate
  modified_base 17: mod_base = OTHER; note = 2'-O-methyladenosine-3'-phosphate
  modified_base 18: mod_base = OTHER; note = 2'-O-methyluridine-3'-phosphate
  modified_base 19: mod_base = OTHER; note = 2'-O-methyluridine-3'-phosphate
  modified_base 20: mod_base = OTHER; note = 2'-O-methylguanosine-3'-phosphate
  modified_base 21: mod_base = OTHER; note = 2'-O-methylcytidine-3'-phosphate
  modified_base 22: mod_base = OTHER; note = 2'-O-methylguanosine-3'-phosphate
  modified_base 23: mod_base = OTHER; note = 2'-O-methylguanosine
tcctttttccgtcaggattgcgg

SEQ ID NO: 4900 - RNA, 23 nt, synthetic construct
  source 1..23: mol_type = other RNA
  modified_base 1: mod_base = OTHER; note = 2'-O-methyluridine-3'-phosphate 5'phosphate
  modified_base 2: mod_base = OTHER; note = 2'-deoxy-2'-fluorocytidine-3'-phosphate
  modified_base 3: mod_base = OTHER; note = 2'-O-methylcytidine-3'-phosphate
  modified_base 4: mod_base = OTHER; note = 2'-O-methylcytidine-3'-phosphate
  modified_base 5: mod_base = OTHER; note = 2'-O-methyluridine-3'-phosphate
  modified_base 6: mod_base = OTHER; note = 2'-deoxy-2'-fluorouridine-3'-phosphate
  modified_base 7: mod_base = OTHER; note = 2'-O-methyluridine-3'-phosphate
  modified_base 8: mod_base = OTHER; note = 2'-O-methyluridine-3'-phosphate
  modified_base 9: mod_base = OTHER; note = 2'-O-methyluridine-3'-phosphate
  modified_base 10: mod_base = OTHER; note = 2'-O-methylcytidine-3'-phosphate
  modified_base 11: mod_base = OTHER; note = 2'-O-methylcytidine-3'-phosphate
  modified_base 12: mod_base = OTHER; note = 2'-O-methylguanosine-3'-phosphate
  modified_base 13: mod_base = OTHER; note = 2'-O-methyluridine-3'-phosphate
  modified_base 14: mod_base = OTHER; note = 2'-deoxy-2'-fluorocytidine-3'-phosphate
  modified_base 15: mod_base = OTHER; note = 2'-O-methyladenosine-3'-phosphate
  modified_base 16: mod_base = OTHER; note = 2'-deoxy-2'-fluoroguanosine-3'-phosphate
  modified_base 17: mod_base = OTHER; note = 2'-O-methylguanosine-3'-phosphate
  modified_base 18: mod_base = OTHER; note = 2'-O-methyladenosine-3'-phosphate
  modified_base 19: mod_base = OTHER; note = 2'-O-methyluridine-3'-phosphate
  modified_base 20: mod_base = OTHER; note = 2'-O-methyluridine-3'-phosphate
  modified_base 21: mod_base = OTHER; note = 2'-O-methylguanosine-3'-phosphate
  modified_base 22: mod_base = OTHER; note = 2'-O-methylcytidine-3'-phosphate
  modified_base 23: mod_base = OTHER; note = 2'-O-methylguanosine
tccctttttccgtcaggattgcg

SEQ ID NO: 4901 - RNA, 23 nt, synthetic construct
  source 1..23: mol_type = other RNA
  modified_base 1: mod_base = OTHER; note = 2'-O-methyluridine-3'-phosphate 5'phosphate
  modified_base 2: mod_base = OTHER; note = 2'-deoxy-2'-fluoroguanosine-3'-phosphate
  modified_base 3: mod_base = OTHER; note = 2'-O-methylcytidine-3'-phosphate
  modified_base 4: mod_base = OTHER; note = 2'-O-methylcytidine-3'-phosphate
  modified_base 5: mod_base = OTHER; note = 2'-O-methylcytidine-3'-phosphate
  modified_base 6: mod_base = OTHER; note = 2'-deoxy-2'-fluorouridine-3'-phosphate
  modified_base 7: mod_base = OTHER; note = 2'-O-methyluridine-3'-phosphate
  modified_base 8: mod_base = OTHER; note = 2'-O-methyluridine-3'-phosphate
  modified_base 9: mod_base = OTHER; note = 2'-O-methyluridine-3'-phosphate
  modified_base 10: mod_base = OTHER; note = 2'-O-methyluridine-3'-phosphate
  modified_base 11: mod_base = OTHER; note = 2'-O-methylcytidine-3'-phosphate
  modified_base 12: mod_base = OTHER; note = 2'-O-methylcytidine-3'-phosphate
  modified_base 13: mod_base = OTHER; note = 2'-O-methylguanosine-3'-phosphate
  modified_base 14: mod_base = OTHER; note = 2'-deoxy-2'-fluorouridine-3'-phosphate
  modified_base 15: mod_base = OTHER; note = 2'-O-methylcytidine-3'-phosphate
  modified_base 16: mod_base = OTHER; note = 2'-deoxy-2'-fluoroadenosine-3'-phosphate
  modified_base 17: mod_base = OTHER; note = 2'-O-methylguanosine-3'-phosphate
  modified_base 18: mod_base = OTHER; note = 2'-O-methylguanosine-3'-phosphate
  modified_base 19: mod_base = OTHER; note = 2'-O-methyladenosine-3'-phosphate
  modified_base 20: mod_base = OTHER; note = 2'-O-methyluridine-3'-phosphate
  modified_base 21: mod_base = OTHER; note = 2'-O-methyluridine-3'-phosphate
  modified_base 22: mod_base = OTHER; note = 2'-O-methylguanosine-3'-phosphate
  modified_base 23: mod_base = OTHER; note = 2'-O-methylcytidine
tgccctttttccgtcaggattgc

SEQ ID NO: 4902 - RNA, 23 nt, synthetic construct
  source 1..23: mol_type = other RNA
  modified_base 1: mod_base = OTHER; note = 2'-O-methyluridine-3'-phosphate 5'phosphate
  modified_base 2: mod_base = OTHER; note = 2'-deoxy-2'-fluoroguanosine-3'-phosphate
  modified_base 3: mod_base = OTHER; note = 2'-O-methylguanosine-3'-phosphate
  modified_base 4: mod_base = OTHER; note = 2'-O-methylcytidine-3'-phosphate
  modified_base 5: mod_base = OTHER; note = 2'-O-methylcytidine-3'-phosphate
  modified_base 6: mod_base = OTHER; note = 2'-deoxy-2'-fluorocytidine-3'-phosphate
  modified_base 7: mod_base = OTHER; note = 2'-O-methyluridine-3'-phosphate
  modified_base 8: mod_base = OTHER; note = 2'-O-methyluridine-3'-phosphate
  modified_base 9: mod_base = OTHER; note = 2'-O-methyluridine-3'-phosphate
  modified_base 10: mod_base = OTHER; note = 2'-O-methyluridine-3'-phosphate
  modified_base 11: mod_base = OTHER; note = 2'-O-methyluridine-3'-phosphate
  modified_base 12: mod_base = OTHER; note = 2'-O-methylcytidine-3'-phosphate
  modified_base 13: mod_base = OTHER; note = 2'-O-methylcytidine-3'-phosphate
  modified_base 14: mod_base = OTHER; note = 2'-deoxy-2'-fluoroguanosine-3'-phosphate
  modified_base 15: mod_base = OTHER; note = 2'-O-methyluridine-3'-phosphate
  modified_base 16: mod_base = OTHER; note = 2'-deoxy-2'-fluorocytidine-3'-phosphate
  modified_base 17: mod_base = OTHER; note = 2'-O-methyladenosine-3'-phosphate
  modified_base 18: mod_base = OTHER; note = 2'-O-methylguanosine-3'-phosphate
  modified_base 19: mod_base = OTHER; note = 2'-O-methylguanosine-3'-phosphate
  modified_base 20: mod_base = OTHER; note = 2'-O-methyladenosine-3'-phosphate
  modified_base 21: mod_base = OTHER; note = 2'-O-methyluridine-3'-phosphate
  modified_base 22: mod_base = OTHER; note = 2'-O-methyluridine-3'-phosphate
  modified_base 23: mod_base = OTHER; note = 2'-O-methylguanosine
tggccctttttccgtcaggattg

SEQ ID NO: 4903 - RNA, 23 nt, synthetic construct
  source 1..23: mol_type = other RNA
  modified_base 1: mod_base = OTHER; note = 2'-O-methyluridine-3'-phosphate 5'phosphate
  modified_base 2: mod_base = OTHER; note = 2'-deoxy-2'-fluoroguanosine-3'-phosphate
  modified_base 3: mod_base = OTHER; note = 2'-O-methyluridine-3'-phosphate
  modified_base 4: mod_base = OTHER; note = 2'-O-methyluridine-3'-phosphate
  modified_base 5: mod_base = OTHER; note = 2'-O-methylguanosine-3'-phosphate
  modified_base 6: mod_base = OTHER; note = 2'-deoxy-2'-fluoroguanosine-3'-phosphate
  modified_base 7: mod_base = OTHER; note = 2'-O-methyluridine-3'-phosphate
  modified_base 8: mod_base = OTHER; note = 2'-O-methyluridine-3'-phosphate
  modified_base 9: mod_base = OTHER; note = 2'-O-methylguanosine-3'-phosphate
  modified_base 10: mod_base = OTHER; note = 2'-O-methyluridine-3'-phosphate
  modified_base 11: mod_base = OTHER; note = 2'-O-methyladenosine-3'-phosphate
  modified_base 12: mod_base = OTHER; note = 2'-O-methyluridine-3'-phosphate
  modified_base 13: mod_base = OTHER; note = 2'-O-methylguanosine-3'-phosphate
  modified_base 14: mod_base = OTHER; note = 2'-deoxy-2'-fluoroguanosine-3'-phosphate
  modified_base 15: mod_base = OTHER; note = 2'-O-methylcytidine-3'-phosphate
  modified_base 16: mod_base = OTHER; note = 2'-deoxy-2'-fluoroadenosine-3'-phosphate
  modified_base 17: mod_base = OTHER; note = 2'-O-methylcytidine-3'-phosphate
  modified_base 18: mod_base = OTHER; note = 2'-O-methylcytidine-3'-phosphate
  modified_base 19: mod_base = OTHER; note = 2'-O-methyladenosine-3'-phosphate
  modified_base 20: mod_base = OTHER; note = 2'-O-methyluridine-3'-phosphate
  modified_base 21: mod_base = OTHER; note = 2'-O-methylguanosine-3'-phosphate
  modified_base 22: mod_base = OTHER; note = 2'-O-methylguanosine-3'-phosphate
  modified_base 23: mod_base = OTHER; note = 2'-O-methylguanosine
tgttggttgtatggcaccatggg

SEQ ID NO: 4904 - RNA, 23 nt, synthetic construct
  source 1..23: mol_type = other RNA
  modified_base 1: mod_base = OTHER; note = 2'-O-methyluridine-3'-phosphate 5'phosphate
  modified_base 2: mod_base = OTHER; note = 2'-deoxy-2'-fluorocytidine-3'-phosphate
  modified_base 3: mod_base = OTHER; note = 2'-O-methyluridine-3'-phosphate
  modified_base 4: mod_base = OTHER; note = 2'-O-methylguanosine-3'-phosphate
  modified_base 5: mod_base = OTHER; note = 2'-O-methyluridine-3'-phosphate
  modified_base 6: mod_base = OTHER; note = 2'-deoxy-2'-fluorouridine-3'-phosphate
  modified_base 7: mod_base = OTHER; note = 2'-O-methylguanosine-3'-phosphate
  modified_base 8: mod_base = OTHER; note = 2'-O-methylguanosine-3'-phosphate
  modified_base 9: mod_base = OTHER; note = 2'-O-methyluridine-3'-phosphate
  modified_base 10: mod_base = OTHER; note = 2'-O-methyluridine-3'-phosphate
  modified_base 11: mod_base = OTHER; note = 2'-O-methylguanosine-3'-phosphate
  modified_base 12: mod_base = OTHER; note = 2'-O-methyluridine-3'-phosphate
  modified_base 13: mod_base = OTHER; note = 2'-O-methyladenosine-3'-phosphate
  modified_base 14: mod_base = OTHER; note = 2'-deoxy-2'-fluorouridine-3'-phosphate
  modified_base 15: mod_base = OTHER; note = 2'-O-methylguanosine-3'-phosphate
  modified_base 16: mod_base = OTHER; note = 2'-deoxy-2'-fluoroguanosine-3'-phosphate
  modified_base 17: mod_base = OTHER; note = 2'-O-methylcytidine-3'-phosphate
  modified_base 18: mod_base = OTHER; note = 2'-O-methyladenosine-3'-phosphate
  modified_base 19: mod_base = OTHER; note = 2'-O-methylcytidine-3'-phosphate
  modified_base 20: mod_base = OTHER; note = 2'-O-methylcytidine-3'-phosphate
  modified_base 21: mod_base = OTHER; note = 2'-O-methyladenosine-3'-phosphate
  modified_base 22: mod_base = OTHER; note = 2'-O-methyluridine-3'-phosphate
  modified_base 23: mod_base = OTHER; note = 2'-O-methylguanosine
tctgttggttgtatggcaccatg

SEQ ID NO: 4905 - RNA, 23 nt, synthetic construct
  source 1..23: mol_type = other RNA
  modified_base 1: mod_base = OTHER; note = 2'-O-methyluridine-3'-phosphate 5'phosphate
  modified_base 2: mod_base = OTHER; note = 2'-deoxy-2'-fluoroguanosine-3'-phosphate
  modified_base 3: mod_base = OTHER; note = 2'-O-methylguanosine-3'-phosphate
  modified_base 4: mod_base = OTHER; note = 2'-O-methylcytidine-3'-phosphate
  modified_base 5: mod_base = OTHER; note = 2'-O-methyluridine-3'-phosphate
  modified_base 6: mod_base = OTHER; note = 2'-deoxy-2'-fluoroguanosine-3'-phosphate
  modified_base 7: mod_base = OTHER; note = 2'-O-methyluridine-3'-phosphate
  modified_base 8: mod_base = OTHER; note = 2'-O-methyluridine-3'-phosphate
  modified_base 9: mod_base = OTHER; note = 2'-O-methylguanosine-3'-phosphate
  modified_base 10: mod_base = OTHER; note = 2'-O-methylguanosine-3'-phosphate
  modified_base 11: mod_base = OTHER; note = 2'-O-methyluridine-3'-phosphate
  modified_base 12: mod_base = OTHER; note = 2'-O-methyluridine-3'-phosphate
  modified_base 13: mod_base = OTHER; note = 2'-O-methylguanosine-3'-phosphate
  modified_base 14: mod_base = OTHER; note = 2'-deoxy-2'-fluorouridine-3'-phosphate
  modified_base 15: mod_base = OTHER; note = 2'-O-methyladenosine-3'-phosphate
  modified_base 16: mod_base = OTHER; note = 2'-deoxy-2'-fluorouridine-3'-phosphate
  modified_base 17: mod_base = OTHER; note = 2'-O-methylguanosine-3'-phosphate
  modified_base 18: mod_base = OTHER; note = 2'-O-methylguanosine-3'-phosphate
  modified_base 19: mod_base = OTHER; note = 2'-O-methylcytidine-3'-phosphate
  modified_base 20: mod_base = OTHER; note = 2'-O-methyladenosine-3'-phosphate
  modified_base 21: mod_base = OTHER; note = 2'-O-methylcytidine-3'-phosphate
  modified_base 22: mod_base = OTHER; note = 2'-O-methylcytidine-3'-phosphate
  modified_base 23: mod_base = OTHER; note = 2'-O-methyladenosine
tggctgttggttgtatggcacca

SEQ ID NO: 4906 - RNA, 23 nt, synthetic construct
  source 1..23: mol_type = other RNA
  modified_base 1: mod_base = OTHER; note = 2'-O-methyluridine-3'-phosphate 5'phosphate
  modified_base 2: mod_base = OTHER; note = 2'-deoxy-2'-fluorouridine-3'-phosphate
  modified_base 3: mod_base = OTHER; note = 2'-O-methyluridine-3'-phosphate
  modified_base 4: mod_base = OTHER; note = 2'-O-methylguanosine-3'-phosphate
  modified_base 5: mod_base = OTHER; note = 2'-O-methylguanosine-3'-phosphate
  modified_base 6: mod_base = OTHER; note = 2'-deoxy-2'-fluorocytidine-3'-phosphate
  modified_base 7: mod_base = OTHER; note = 2'-O-methyluridine-3'-phosphate
  modified_base 8: mod_base = OTHER; note = 2'-O-methylguanosine-3'-phosphate
  modified_base 9: mod_base = OTHER; note = 2'-O-methyluridine-3'-phosphate
  modified_base 10: mod_base = OTHER; note = 2'-O-methyluridine-3'-phosphate
  modified_base 11: mod_base = OTHER; note = 2'-O-methylguanosine-3'-phosphate
  modified_base 12: mod_base = OTHER; note = 2'-O-methylguanosine-3'-phosphate
  modified_base 13: mod_base = OTHER; note = 2'-O-methyluridine-3'-phosphate
  modified_base 14: mod_base = OTHER; note = 2'-deoxy-2'-fluorouridine-3'-phosphate
  modified_base 15: mod_base = OTHER; note = 2'-O-methylguanosine-3'-phosphate
  modified_base 16: mod_base = OTHER; note = 2'-deoxy-2'-fluorouridine-3'-phosphate
  modified_base 17: mod_base = OTHER; note = 2'-O-methyladenosine-3'-phosphate
  modified_base 18: mod_base = OTHER; note = 2'-O-methyluridine-3'-phosphate
  modified_base 19: mod_base = OTHER; note = 2'-O-methylguanosine-3'-phosphate
  modified_base 20: mod_base = OTHER; note = 2'-O-methylguanosine-3'-phosphate
  modified_base 21: mod_base = OTHER; note = 2'-O-methylcytidine-3'-phosphate
  modified_base 22: mod_base = OTHER; note = 2'-O-methyladenosine-3'-phosphate
  modified_base 23: mod_base = OTHER; note = 2'-O-methylcytidine
tttggctgttggttgtatggcac

SEQ ID NO: 4907 - RNA, 23 nt, synthetic construct
  source 1..23: mol_type = other RNA
  modified_base 1: mod_base = OTHER; note = 2'-O-methyluridine-3'-phosphate 5'phosphate
  modified_base 2: mod_base = OTHER; note = 2'-deoxy-2'-fluorocytidine-3'-phosphate
  modified_base 3: mod_base = OTHER; note = 2'-O-methyluridine-3'-phosphate
  modified_base 4: mod_base = OTHER; note = 2'-O-methyluridine-3'-phosphate
  modified_base 5: mod_base = OTHER; note = 2'-O-methylguanosine-3'-phosphate
  modified_base 6: mod_base = OTHER; note = 2'-deoxy-2'-fluoroguanosine-3'-phosphate
  modified_base 7: mod_base = OTHER; note = 2'-O-methylcytidine-3'-phosphate
  modified_base 8: mod_base = OTHER; note = 2'-O-methyluridine-3'-phosphate
  modified_base 9: mod_base = OTHER; note = 2'-O-methylguanosine-3'-phosphate
  modified_base 10: mod_base = OTHER; note = 2'-O-methyluridine-3'-phosphate
  modified_base 11: mod_base = OTHER; note = 2'-O-methyluridine-3'-phosphate
  modified_base 12: mod_base = OTHER; note = 2'-O-methylguanosine-3'-phosphate
  modified_base 13: mod_base = OTHER; note = 2'-O-methylguanosine-3'-phosphate
  modified_base 14: mod_base = OTHER; note = 2'-deoxy-2'-fluorouridine-3'-phosphate
  modified_base 15: mod_base = OTHER; note = 2'-O-methyluridine-3'-phosphate
  modified_base 16: mod_base = OTHER; note = 2'-deoxy-2'-fluoroguanosine-3'-phosphate
  modified_base 17: mod_base = OTHER; note = 2'-O-methyluridine-3'-phosphate
  modified_base 18: mod_base = OTHER; note = 2'-O-methyladenosine-3'-phosphate
  modified_base 19: mod_base = OTHER; note = 2'-O-methyluridine-3'-phosphate
  modified_base 20: mod_base = OTHER; note = 2'-O-methylguanosine-3'-phosphate
  modified_base 21: mod_base = OTHER; note = 2'-O-methylguanosine-3'-phosphate
  modified_base 22: mod_base = OTHER; note = 2'-O-methylcytidine-3'-phosphate
  modified_base 23: mod_base = OTHER; note = 2'-O-methyladenosine
tcttggctgttggttgtatggca

SEQ ID NO: 4908 - RNA, 23 nt, synthetic construct
  source 1..23: mol_type = other RNA
  modified_base 1: mod_base = OTHER; note = 2'-O-methyluridine-3'-phosphate 5'phosphate
  modified_base 2: mod_base = OTHER; note = 2'-deoxy-2'-fluoroadenosine-3'-phosphate
  modified_base 3: mod_base = OTHER; note = 2'-O-methylcytidine-3'-phosphate
  modified_base 4: mod_base = OTHER; note = 2'-O-methyluridine-3'-phosphate
  modified_base 5: mod_base = OTHER; note = 2'-O-methyluridine-3'-phosphate
  modified_base 6: mod_base = OTHER; note = 2'-deoxy-2'-fluoroguanosine-3'-phosphate
  modified_base 7: mod_base = OTHER; note = 2'-O-methylguanosine-3'-phosphate
  modified_base 8: mod_base = OTHER; note = 2'-O-methylcytidine-3'-phosphate
  modified_base 9: mod_base = OTHER; note = 2'-O-methyluridine-3'-phosphate
  modified_base 10: mod_base = OTHER; note = 2'-O-methylguanosine-3'-phosphate
  modified_base 11: mod_base = OTHER; note = 2'-O-methyluridine-3'-phosphate
  modified_base 12: mod_base = OTHER; note = 2'-O-methyluridine-3'-phosphate
  modified_base 13: mod_base = OTHER; note = 2'-O-methylguanosine-3'-phosphate
  modified_base 14: mod_base = OTHER; note = 2'-deoxy-2'-fluoroguanosine-3'-phosphate
  modified_base 15: mod_base = OTHER; note = 2'-O-methyluridine-3'-phosphate
  modified_base 16: mod_base = OTHER; note = 2'-deoxy-2'-fluorouridine-3'-phosphate
  modified_base 17: mod_base = OTHER; note = 2'-O-methylguanosine-3'-phosphate
  modified_base 18: mod_base = OTHER; note = 2'-O-methyluridine-3'-phosphate
  modified_base 19: mod_base = OTHER; note = 2'-O-methyladenosine-3'-phosphate
  modified_base 20: mod_base = OTHER; note = 2'-O-methyluridine-3'-phosphate
  modified_base 21: mod_base = OTHER; note = 2'-O-methylguanosine-3'-phosphate
  modified_base 22: mod_base = OTHER; note = 2'-O-methylguanosine-3'-phosphate
  modified_base 23: mod_base = OTHER; note = 2'-O-methylcytidine
tacttggctgttggttgtatggc

SEQ ID NO: 4909 - RNA, 23 nt, synthetic construct
  source 1..23: mol_type = other RNA
  modified_base 1: mod_base = OTHER; note = 2'-O-methyluridine-3'-phosphate 5'phosphate
  modified_base 2: mod_base = OTHER; note = 2'-deoxy-2'-fluorocytidine-3'-phosphate
  modified_base 3: mod_base = OTHER; note = 2'-O-methyladenosine-3'-phosphate
  modified_base 4: mod_base = OTHER; note = 2'-O-methylcytidine-3'-phosphate
  modified_base 5: mod_base = OTHER; note = 2'-O-methyluridine-3'-phosphate
  modified_base 6: mod_base = OTHER; note = 2'-deoxy-2'-fluorouridine-3'-phosphate
  modified_base 7: mod_base = OTHER; note = 2'-O-methylguanosine-3'-phosphate
  modified_base 8: mod_base = OTHER; note = 2'-O-methylguanosine-3'-phosphate
  modified_base 9: mod_base = OTHER; note = 2'-O-methylcytidine-3'-phosphate
  modified_base 10: mod_base = OTHER; note = 2'-O-methyluridine-3'-phosphate
  modified_base 11: mod_base = OTHER; note = 2'-O-methylguanosine-3'-phosphate
  modified_base 12: mod_base = OTHER; note = 2'-O-methyluridine-3'-phosphate
  modified_base 13: mod_base = OTHER; note = 2'-O-methyluridine-3'-phosphate
  modified_base 14: mod_base = OTHER; note = 2'-deoxy-2'-fluoroguanosine-3'-phosphate
  modified_base 15: mod_base = OTHER; note = 2'-O-methylguanosine-3'-phosphate
  modified_base 16: mod_base = OTHER; note = 2'-deoxy-2'-fluorouridine-3'-phosphate
  modified_base 17: mod_base = OTHER; note = 2'-O-methyluridine-3'-phosphate
  modified_base 18: mod_base = OTHER; note = 2'-O-methylguanosine-3'-phosphate
  modified_base 19: mod_base = OTHER; note = 2'-O-methyluridine-3'-phosphate
  modified_base 20: mod_base = OTHER; note = 2'-O-methyladenosine-3'-phosphate
  modified_base 21: mod_base = OTHER; note = 2'-O-methyluridine-3'-phosphate
  modified_base 22: mod_base = OTHER; note = 2'-O-methylguanosine-3'-phosphate
  modified_base 23: mod_base = OTHER; note = 2'-O-methylguanosine
tcacttggctgttggttgtatgg

SEQ ID NO: 4910 - RNA, 23 nt, synthetic construct
  source 1..23: mol_type = other RNA
  modified_base 1: mod_base = OTHER; note = 2'-O-methyluridine-3'-phosphate 5'phosphate
  modified_base 2: mod_base = OTHER; note = 2'-deoxy-2'-fluoroguanosine-3'-phosphate
  modified_base 3: mod_base = OTHER; note = 2'-O-methylcytidine-3'-phosphate
  modified_base 4: mod_base = OTHER; note = 2'-O-methyladenosine-3'-phosphate
  modified_base 5: mod_base = OTHER; note = 2'-O-methylcytidine-3'-phosphate
  modified_base 6: mod_base = OTHER; note = 2'-deoxy-2'-fluorouridine-3'-phosphate
  modified_base 7: mod_base = OTHER; note = 2'-O-methyluridine-3'-phosphate
  modified_base 8: mod_base = OTHER; note = 2'-O-methylguanosine-3'-phosphate
  modified_base 9: mod_base = OTHER; note = 2'-O-methylguanosine-3'-phosphate
  modified_base 10: mod_base = OTHER; note = 2'-O-methylcytidine-3'-phosphate
  modified_base 11: mod_base = OTHER; note = 2'-O-methyluridine-3'-phosphate
  modified_base 12: mod_base = OTHER; note = 2'-O-methylguanosine-3'-phosphate
  modified_base 13: mod_base = OTHER; note = 2'-O-methyluridine-3'-phosphate
  modified_base 14: mod_base = OTHER; note = 2'-deoxy-2'-fluorouridine-3'-phosphate
  modified_base 15: mod_base = OTHER; note = 2'-O-methylguanosine-3'-phosphate
  modified_base 16: mod_base = OTHER; note = 2'-deoxy-2'-fluoroguanosine-3'-phosphate
  modified_base 17: mod_base = OTHER; note = 2'-O-methyluridine-3'-phosphate
  modified_base 18: mod_base = OTHER; note = 2'-O-methyluridine-3'-phosphate
  modified_base 19: mod_base = OTHER; note = 2'-O-methylguanosine-3'-phosphate
  modified_base 20: mod_base = OTHER; note = 2'-O-methyluridine-3'-phosphate
  modified_base 21: mod_base = OTHER; note = 2'-O-methyladenosine-3'-phosphate
  modified_base 22: mod_base = OTHER; note = 2'-O-methyluridine-3'-phosphate
  modified_base 23: mod_base = OTHER; note = 2'-O-methylguanosine
tgcacttggctgttggttgtatg

SEQ ID NO: 4911 - RNA, 23 nt, synthetic construct
  source 1..23: mol_type = other RNA
  modified_base 1: mod_base = OTHER; note = 2'-O-methyluridine-3'-phosphate 5'phosphate
  modified_base 2: mod_base = OTHER; note = 2'-deoxy-2'-fluorocytidine-3'-phosphate
  modified_base 3: mod_base = OTHER; note = 2'-O-methylguanosine-3'-phosphate
  modified_base 4: mod_base = OTHER; note = 2'-O-methylcytidine-3'-phosphate
  modified_base 5: mod_base = OTHER; note = 2'-O-methyladenosine-3'-phosphate
  modified_base 6: mod_base = OTHER; note = 2'-deoxy-2'-fluorocytidine-3'-phosphate
  modified_base 7: mod_base = OTHER; note = 2'-O-methyluridine-3'-phosphate
  modified_base 8: mod_base = OTHER; note = 2'-O-methyluridine-3'-phosphate
  modified_base 9: mod_base = OTHER; note = 2'-O-methylguanosine-3'-phosphate
  modified_base 10: mod_base = OTHER; note = 2'-O-methylguanosine-3'-phosphate
  modified_base 11: mod_base = OTHER; note = 2'-O-methylcytidine-3'-phosphate
  modified_base 12: mod_base = OTHER; note = 2'-O-methyluridine-3'-phosphate
  modified_base 13: mod_base = OTHER; note = 2'-O-methylguanosine-3'-phosphate
  modified_base 14: mod_base = OTHER; note = 2'-deoxy-2'-fluorouridine-3'-phosphate
  modified_base 15: mod_base = OTHER; note = 2'-O-methyluridine-3'-phosphate
  modified_base 16: mod_base = OTHER; note = 2'-deoxy-2'-fluoroguanosine-3'-phosphate
  modified_base 17: mod_base = OTHER; note = 2'-O-methylguanosine-3'-phosphate
  modified_base 18: mod_base = OTHER; note = 2'-O-methyluridine-3'-phosphate
  modified_base 19: mod_base = OTHER; note = 2'-O-methyluridine-3'-phosphate
  modified_base 20: mod_base = OTHER; note = 2'-O-methylguanosine-3'-phosphate
  modified_base 21: mod_base = OTHER; note = 2'-O-methyluridine-3'-phosphate
  modified_base 22: mod_base = OTHER; note = 2'-O-methyladenosine-3'-phosphate
  modified_base 23: mod_base = OTHER; note = 2'-O-methyluridine
tcgcacttggctgttggttgtat

SEQ ID NO: 4912 - RNA, 23 nt, synthetic construct
  source 1..23: mol_type = other RNA
  modified_base 1: mod_base = OTHER; note = 2'-O-methyluridine-3'-phosphate 5'phosphate
  modified_base 2: mod_base = OTHER; note = 2'-deoxy-2'-fluoroguanosine-3'-phosphate
  modified_base 3: mod_base = OTHER; note = 2'-O-methyluridine-3'-phosphate
  modified_base 4: mod_base = OTHER; note = 2'-O-methyladenosine-3'-phosphate
  modified_base 5: mod_base = OTHER; note = 2'-O-methylcytidine-3'-phosphate
  modified_base 6: mod_base = OTHER; note = 2'-deoxy-2'-fluorouridine-3'-phosphate
  modified_base 7: mod_base = OTHER; note = 2'-O-methylcytidine-3'-phosphate
  modified_base 8: mod_base = OTHER; note = 2'-O-methylcytidine-3'-phosphate
  modified_base 9: mod_base = OTHER; note = 2'-O-methylcytidine-3'-phosphate
  modified_base 10: mod_base = OTHER; note = 2'-O-methyladenosine-3'-phosphate
  modified_base 11: mod_base = OTHER; note = 2'-O-methylcytidine-3'-phosphate
  modified_base 12: mod_base = OTHER; note = 2'-O-methylcytidine-3'-phosphate
  modified_base 13: mod_base = OTHER; note = 2'-O-methylguanosine-3'-phosphate
  modified_base 14: mod_base = OTHER; note = 2'-deoxy-2'-fluorocytidine-3'-phosphate
  modified_base 15: mod_base = OTHER; note = 2'-O-methyladenosine-3'-phosphate
  modified_base 16: mod_base = OTHER; note = 2'-deoxy-2'-fluorocytidine-3'-phosphate
  modified_base 17: mod_base = OTHER; note = 2'-O-methyluridine-3'-phosphate
  modified_base 18: mod_base = OTHER; note = 2'-O-methyluridine-3'-phosphate
  modified_base 19: mod_base = OTHER; note = 2'-O-methylguanosine-3'-phosphate
  modified_base 20: mod_base = OTHER; note = 2'-O-methylguanosine-3'-phosphate
  modified_base 21: mod_base = OTHER; note = 2'-O-methylcytidine-3'-phosphate
  modified_base 22: mod_base = OTHER; note = 2'-O-methyluridine-3'-phosphate
  modified_base 23: mod_base = OTHER; note = 2'-O-methylguanosine
tgtactcccaccgcacttggctg

SEQ ID NO: 4913 - RNA, 23 nt, synthetic construct
  source 1..23: mol_type = other RNA
  modified_base 1: mod_base = OTHER; note = 2'-O-methyluridine-3'-phosphate 5'phosphate
  modified_base 2: mod_base = OTHER; note = 2'-deoxy-2'-fluoroadenosine-3'-phosphate
  modified_base 3: mod_base = OTHER; note = 2'-O-methylcytidine-3'-phosphate
  modified_base 4: mod_base = OTHER; note = 2'-O-methyladenosine-3'-phosphate
  modified_base 5: mod_base = OTHER; note = 2'-O-methylguanosine-3'-phosphate
  modified_base 6: mod_base = OTHER; note = 2'-deoxy-2'-fluorouridine-3'-phosphate
  modified_base 7: mod_base = OTHER; note = 2'-O-methyladenosine-3'-phosphate
  modified_base 8: mod_base = OTHER; note = 2'-O-methylcytidine-3'-phosphate
  modified_base 9: mod_base = OTHER; note = 2'-O-methyluridine-3'-phosphate
  modified_base 10: mod_base = OTHER; note = 2'-O-methylcytidine-3'-phosphate
  modified_base 11: mod_base = OTHER; note = 2'-O-methylcytidine-3'-phosphate
  modified_base 12: mod_base = OTHER; note = 2'-O-methylcytidine-3'-phosphate
  modified_base 13: mod_base = OTHER; note = 2'-O-methyladenosine-3'-phosphate
  modified_base 14: mod_base = OTHER; note = 2'-deoxy-2'-fluorocytidine-3'-phosphate
  modified_base 15: mod_base = OTHER; note = 2'-O-methylcytidine-3'-phosphate
  modified_base 16: mod_base = OTHER; note = 2'-deoxy-2'-fluoroguanosine-3'-phosphate
  modified_base 17: mod_base = OTHER; note = 2'-O-methylcytidine-3'-phosphate
  modified_base 18: mod_base = OTHER; note = 2'-O-methyladenosine-3'-phosphate
  modified_base 19: mod_base = OTHER; note = 2'-O-methylcytidine-3'-phosphate
  modified_base 20: mod_base = OTHER; note = 2'-O-methyluridine-3'-phosphate
  modified_base 21: mod_base = OTHER; note = 2'-O-methyluridine-3'-phosphate
  modified_base 22: mod_base = OTHER; note = 2'-O-methylguanosine-3'-phosphate
  modified_base 23: mod_base = OTHER; note = 2'-O-methylguanosine
tacagtactcccaccgcacttgg

SEQ ID NO: 4914 - RNA, 23 nt, synthetic construct
  source 1..23: mol_type = other RNA
  modified_base 1: mod_base = OTHER; note = 2'-O-methyluridine-3'-phosphate 5'phosphate
  modified_base 2: mod_base = OTHER; note = 2'-deoxy-2'-fluorouridine-3'-phosphate
  modified_base 3: mod_base = OTHER; note = 2'-O-methyladenosine-3'-phosphate
  modified_base 4: mod_base = OTHER; note = 2'-O-methylcytidine-3'-phosphate
  modified_base 5: mod_base = OTHER; note = 2'-O-methyladenosine-3'-phosphate
  modified_base 6: mod_base = OTHER; note = 2'-deoxy-2'-fluoroguanosine-3'-phosphate
  modified_base 7: mod_base = OTHER; note = 2'-O-methyluridine-3'-phosphate
  modified_base 8: mod_base = OTHER; note = 2'-O-methyladenosine-3'-phosphate
  modified_base 9: mod_base = OTHER; note = 2'-O-methylcytidine-3'-phosphate
  modified_base 10: mod_base = OTHER; note = 2'-O-methyluridine-3'-phosphate
  modified_base 11: mod_base = OTHER; note = 2'-O-methylcytidine-3'-phosphate
  modified_base 12: mod_base = OTHER; note = 2'-O-methylcytidine-3'-phosphate
  modified_base 13: mod_base = OTHER; note = 2'-O-methylcytidine-3'-phosphate
  modified_base 14: mod_base = OTHER; note = 2'-deoxy-2'-fluoroadenosine-3'-phosphate
  modified_base 15: mod_base = OTHER; note = 2'-O-methylcytidine-3'-phosphate
  modified_base 16: mod_base = OTHER; note = 2'-deoxy-2'-fluorocytidine-3'-phosphate
  modified_base 17: mod_base = OTHER; note = 2'-O-methylguanosine-3'-phosphate
  modified_base 18: mod_base = OTHER; note = 2'-O-methylcytidine-3'-phosphate
  modified_base 19: mod_base = OTHER; note = 2'-O-methyladenosine-3'-phosphate
  modified_base 20: mod_base = OTHER; note = 2'-O-methylcytidine-3'-phosphate
  modified_base 21: mod_base = OTHER; note = 2'-O-methyluridine-3'-phosphate
  modified_base 22: mod_base = OTHER; note = 2'-O-methyluridine-3'-phosphate
  modified_base 23: mod_base = OTHER; note = 2'-O-methylguanosine
ttacagtactcccaccgcacttg

SEQ ID NO: 4915 - RNA, 23 nt, synthetic construct
  source 1..23: mol_type = other RNA
  modified_base 1: mod_base = OTHER; note = 2'-O-methyluridine-3'-phosphate 5'phosphate
  modified_base 2: mod_base = OTHER; note = 2'-deoxy-2'-fluorouridine-3'-phosphate
  modified_base 3: mod_base = OTHER; note = 2'-O-methyluridine-3'-phosphate
  modified_base 4: mod_base = OTHER; note = 2'-O-methyladenosine-3'-phosphate
  modified_base 5: mod_base = OTHER; note = 2'-O-methylcytidine-3'-phosphate
  modified_base 6: mod_base = OTHER; note = 2'-deoxy-2'-fluoroadenosine-3'-phosphate
  modified_base 7: mod_base = OTHER; note = 2'-O-methylguanosine-3'-phosphate
  modified_base 8: mod_base = OTHER; note = 2'-O-methyluridine-3'-phosphate
  modified_base 9: mod_base = OTHER; note = 2'-O-methyladenosine-3'-phosphate
  modified_base 10: mod_base = OTHER; note = 2'-O-methylcytidine-3'-phosphate
  modified_base 11: mod_base = OTHER; note = 2'-O-methyluridine-3'-phosphate
  modified_base 12: mod_base = OTHER; note = 2'-O-methylcytidine-3'-phosphate
  modified_base 13: mod_base = OTHER; note = 2'-O-methylcytidine-3'-phosphate
  modified_base 14: mod_base = OTHER; note = 2'-deoxy-2'-fluorocytidine-3'-phosphate
  modified_base 15: mod_base = OTHER; note = 2'-O-methyladenosine-3'-phosphate
  modified_base 16: mod_base = OTHER; note = 2'-deoxy-2'-fluorocytidine-3'-phosphate
  modified_base 17: mod_base = OTHER; note = 2'-O-methylcytidine-3'-phosphate
  modified_base 18: mod_base = OTHER; note = 2'-O-methylguanosine-3'-phosphate
  modified_base 19: mod_base = OTHER; note = 2'-O-methylcytidine-3'-phosphate
  modified_base 20: mod_base = OTHER; note = 2'-O-methyladenosine-3'-phosphate
  modified_base 21: mod_base = OTHER; note = 2'-O-methylcytidine-3'-phosphate
  modified_base 22: mod_base = OTHER; note = 2'-O-methyluridine-3'-phosphate
  modified_base 23: mod_base = OTHER; note = 2'-O-methyluridine
tttacagtactcccaccgcactt

SEQ ID NO: 4916 - RNA, 23 nt, synthetic construct
  source 1..23: mol_type = other RNA
  modified_base 1: mod_base = OTHER; note = 2'-O-methyluridine-3'-phosphate 5'phosphate
  modified_base 2: mod_base = OTHER; note = 2'-deoxy-2'-fluorocytidine-3'-phosphate
  modified_base 3: mod_base = OTHER; note = 2'-O-methyluridine-3'-phosphate
  modified_base 4: mod_base = OTHER; note = 2'-O-methyluridine-3'-phosphate
  modified_base 5: mod_base = OTHER; note = 2'-O-methyladenosine-3'-phosphate
  modified_base 6: mod_base = OTHER; note = 2'-deoxy-2'-fluorocytidine-3'-phosphate
  modified_base 7: mod_base = OTHER; note = 2'-O-methyladenosine-3'-phosphate
  modified_base 8: mod_base = OTHER; note = 2'-O-methylguanosine-3'-phosphate
  modified_base 9: mod_base = OTHER; note = 2'-O-methyluridine-3'-phosphate
  modified_base 10: mod_base = OTHER; note = 2'-O-methyladenosine-3'-phosphate
  modified_base 11: mod_base = OTHER; note = 2'-O-methylcytidine-3'-phosphate
  modified_base 12: mod_base = OTHER; note = 2'-O-methyluridine-3'-phosphate
  modified_base 13: mod_base = OTHER; note = 2'-O-methylcytidine-3'-phosphate
  modified_base 14: mod_base = OTHER; note = 2'-deoxy-2'-fluorocytidine-3'-phosphate
  modified_base 15: mod_base = OTHER; note = 2'-O-methylcytidine-3'-phosphate
  modified_base 16: mod_base = OTHER; note = 2'-deoxy-2'-fluoroadenosine-3'-phosphate
  modified_base 17: mod_base = OTHER; note = 2'-O-methylcytidine-3'-phosphate
  modified_base 18: mod_base = OTHER; note = 2'-O-methylcytidine-3'-phosphate
  modified_base 19: mod_base = OTHER; note = 2'-O-methylguanosine-3'-phosphate
  modified_base 20: mod_base = OTHER; note = 2'-O-methylcytidine-3'-phosphate
  modified_base 21: mod_base = OTHER; note = 2'-O-methyladenosine-3'-phosphate
  modified_base 22: mod_base = OTHER; note = 2'-O-methylcytidine-3'-phosphate
  modified_base 23: mod_base = OTHER; note = 2'-O-methyluridine
tcttacagtactcccaccgcact

SEQ ID NO: 4917 - RNA, 23 nt, synthetic construct
  source 1..23: mol_type = other RNA
  modified_base 1: mod_base = OTHER; note = 2'-O-methyluridine-3'-phosphate 5'phosphate
  modified_base 2: mod_base = OTHER; note = 2'-deoxy-2'-fluorouridine-3'-phosphate
  modified_base 3: mod_base = OTHER; note = 2'-O-methylcytidine-3'-phosphate
  modified_base 4: mod_base = OTHER; note = 2'-O-methyluridine-3'-phosphate
  modified_base 5: mod_base = OTHER; note = 2'-O-methyluridine-3'-phosphate
  modified_base 6: mod_base = OTHER; note = 2'-deoxy-2'-fluoroadenosine-3'-phosphate
  modified_base 7: mod_base = OTHER; note = 2'-O-methylcytidine-3'-phosphate
  modified_base 8: mod_base = OTHER; note = 2'-O-methyladenosine-3'-phosphate
  modified_base 9: mod_base = OTHER; note = 2'-O-methylguanosine-3'-phosphate
  modified_base 10: mod_base = OTHER; note = 2'-O-methyluridine-3'-phosphate
  modified_base 11: mod_base = OTHER; note = 2'-O-methyladenosine-3'-phosphate
  modified_base 12: mod_base = OTHER; note = 2'-O-methylcytidine-3'-phosphate
  modified_base 13: mod_base = OTHER; note = 2'-O-methyluridine-3'-phosphate
  modified_base 14: mod_base = OTHER; note = 2'-deoxy-2'-fluorocytidine-3'-phosphate
  modified_base 15: mod_base = OTHER; note = 2'-O-methylcytidine-3'-phosphate
  modified_base 16: mod_base = OTHER; note = 2'-deoxy-2'-fluorocytidine-3'-phosphate
  modified_base 17: mod_base = OTHER; note = 2'-O-methyladenosine-3'-phosphate
  modified_base 18: mod_base = OTHER; note = 2'-O-methylcytidine-3'-phosphate
  modified_base 19: mod_base = OTHER; note = 2'-O-methylcytidine-3'-phosphate
  modified_base 20: mod_base = OTHER; note = 2'-O-methylguanosine-3'-phosphate
  modified_base 21: mod_base = OTHER; note = 2'-O-methylcytidine-3'-phosphate
  modified_base 22: mod_base = OTHER; note = 2'-O-methyladenosine-3'-phosphate
  modified_base 23: mod_base = OTHER; note = 2'-O-methylcytidine
ttcttacagtactcccaccgcac

SEQ ID NO: 4918 - RNA, 23 nt, synthetic construct
  source 1..23: mol_type = other RNA
  modified_base 1: mod_base = OTHER; note = 2'-O-methyluridine-3'-phosphate 5'phosphate
  modified_base 2: mod_base = OTHER; note = 2'-deoxy-2'-fluoroadenosine-3'-phosphate
  modified_base 3: mod_base = OTHER; note = 2'-O-methyluridine-3'-phosphate
  modified_base 4: mod_base = OTHER; note = 2'-O-methylcytidine-3'-phosphate
  modified_base 5: mod_base = OTHER; note = 2'-O-methyluridine-3'-phosphate
  modified_base 6: mod_base = OTHER; note = 2'-deoxy-2'-fluorouridine-3'-phosphate
  modified_base 7: mod_base = OTHER; note = 2'-O-methyladenosine-3'-phosphate
  modified_base 8: mod_base = OTHER; note = 2'-O-methylcytidine-3'-phosphate
  modified_base 9: mod_base = OTHER; note = 2'-O-methyladenosine-3'-phosphate
  modified_base 10: mod_base = OTHER; note = 2'-O-methylguanosine-3'-phosphate
  modified_base 11: mod_base = OTHER; note = 2'-O-methyluridine-3'-phosphate
  modified_base 12: mod_base = OTHER; note = 2'-O-methyladenosine-3'-phosphate
  modified_base 13: mod_base = OTHER; note = 2'-O-methylcytidine-3'-phosphate
  modified_base 14: mod_base = OTHER; note = 2'-deoxy-2'-fluorouridine-3'-phosphate
  modified_base 15: mod_base = OTHER; note = 2'-O-methylcytidine-3'-phosphate
  modified_base 16: mod_base = OTHER; note = 2'-deoxy-2'-fluorocytidine-3'-phosphate
  modified_base 17: mod_base = OTHER; note = 2'-O-methylcytidine-3'-phosphate
  modified_base 18: mod_base = OTHER; note = 2'-O-methyladenosine-3'-phosphate
  modified_base 19: mod_base = OTHER; note = 2'-O-methylcytidine-3'-phosphate
  modified_base 20: mod_base = OTHER; note = 2'-O-methylcytidine-3'-phosphate
  modified_base 21: mod_base = OTHER; note = 2'-O-methylguanosine-3'-phosphate
  modified_base 22: mod_base = OTHER; note = 2'-O-methylcytidine-3'-phosphate
  modified_base 23: mod_base = OTHER; note = 2'-O-methyladenosine
tatcttacagtactcccaccgca

SEQ ID NO: 4919 - RNA, 23 nt, synthetic construct
  source 1..23: mol_type = other RNA
  modified_base 1: mod_base = OTHER; note = 2'-O-methyluridine-3'-phosphate 5'phosphate
  modified_base 2: mod_base = OTHER; note = 2'-deoxy-2'-fluorouridine-3'-phosphate
  modified_base 3: mod_base = OTHER; note = 2'-O-methyladenosine-3'-phosphate
  modified_base 4: mod_base = OTHER; note = 2'-O-methyluridine-3'-phosphate
  modified_base 5: mod_base = OTHER; note = 2'-O-methylcytidine-3'-phosphate
  modified_base 6: mod_base = OTHER; note = 2'-deoxy-2'-fluorouridine-3'-phosphate
  modified_base 7: mod_base = OTHER; note = 2'-O-methyluridine-3'-phosphate
  modified_base 8: mod_base = OTHER; note = 2'-O-methyladenosine-3'-phosphate
  modified_base 9: mod_base = OTHER; note = 2'-O-methylcytidine-3'-phosphate
  modified_base 10: mod_base = OTHER; note = 2'-O-methyladenosine-3'-phosphate
  modified_base 11: mod_base = OTHER; note = 2'-O-methylguanosine-3'-phosphate
  modified_base 12: mod_base = OTHER; note = 2'-O-methyluridine-3'-phosphate
  modified_base 13: mod_base = OTHER; note = 2'-O-methyladenosine-3'-phosphate
  modified_base 14: mod_base = OTHER; note = 2'-deoxy-2'-fluorocytidine-3'-phosphate
  modified_base 15: mod_base = OTHER; note = 2'-O-methyluridine-3'-phosphate
  modified_base 16: mod_base = OTHER; note = 2'-deoxy-2'-fluorocytidine-3'-phosphate
  modified_base 17: mod_base = OTHER; note = 2'-O-methylcytidine-3'-phosphate
  modified_base 18: mod_base = OTHER; note = 2'-O-methylcytidine-3'-phosphate
  modified_base 19: mod_base = OTHER; note = 2'-O-methyladenosine-3'-phosphate
  modified_base 20: mod_base = OTHER; note = 2'-O-methylcytidine-3'-phosphate
  modified_base 21: mod_base = OTHER; note = 2'-O-methylcytidine-3'-phosphate
  modified_base 22: mod_base = OTHER; note = 2'-O-methylguanosine-3'-phosphate
  modified_base 23: mod_base = OTHER; note = 2'-O-methylcytidine
ttatcttacagtactcccaccgc

SEQ ID NO: 4920 - RNA, 23 nt, synthetic construct
  source 1..23: mol_type = other RNA
  modified_base 1: mod_base = OTHER; note = 2'-O-methyluridine-3'-phosphate 5'phosphate
  modified_base 2: mod_base = OTHER; note = 2'-deoxy-2'-fluoroguanosine-3'-phosphate
  modified_base 3: mod_base = OTHER; note = 2'-O-methyluridine-3'-phosphate
  modified_base 4: mod_base = OTHER; note = 2'-O-methyladenosine-3'-phosphate
  modified_base 5: mod_base = OTHER; note = 2'-O-methyluridine-3'-phosphate
  modified_base 6: mod_base = OTHER; note = 2'-deoxy-2'-fluorocytidine-3'-phosphate
  modified_base 7: mod_base = OTHER; note = 2'-O-methyluridine-3'-phosphate
  modified_base 8: mod_base = OTHER; note = 2'-O-methyluridine-3'-phosphate
  modified_base 9: mod_base = OTHER; note = 2'-O-methyladenosine-3'-phosphate
  modified_base 10: mod_base = OTHER; note = 2'-O-methylcytidine-3'-phosphate
  modified_base 11: mod_base = OTHER; note = 2'-O-methyladenosine-3'-phosphate
  modified_base 12: mod_base = OTHER; note = 2'-O-methylguanosine-3'-phosphate
  modified_base 13: mod_base = OTHER; note = 2'-O-methyluridine-3'-phosphate
  modified_base 14: mod_base = OTHER; note = 2'-deoxy-2'-fluoroadenosine-3'-phosphate
  modified_base 15: mod_base = OTHER; note = 2'-O-methylcytidine-3'-phosphate
  modified_base 16: mod_base = OTHER; note = 2'-deoxy-2'-fluorouridine-3'-phosphate
  modified_base 17: mod_base = OTHER; note = 2'-O-methylcytidine-3'-phosphate
  modified_base 18: mod_base = OTHER; note = 2'-O-methylcytidine-3'-phosphate
  modified_base 19: mod_base = OTHER; note = 2'-O-methylcytidine-3'-phosphate
  modified_base 20: mod_base = OTHER; note = 2'-O-methyladenosine-3'-phosphate
  modified_base 21: mod_base = OTHER; note = 2'-O-methylcytidine-3'-phosphate
  modified_base 22: mod_base = OTHER; note = 2'-O-methylcytidine-3'-phosphate
  modified_base 23: mod_base = OTHER; note = 2'-O-methylguanosine
tgtatcttacagtactcccaccg

SEQ ID NO: 4921 - RNA, 23 nt, synthetic construct
  source 1..23: mol_type = other RNA
  modified_base 1: mod_base = OTHER; note = 2'-O-methyluridine-3'-phosphate 5'phosphate
  modified_base 2: mod_base = OTHER; note = 2'-deoxy-2'-fluoroguanosine-3'-phosphate
  modified_base 3: mod_base = OTHER; note = 2'-O-methylguanosine-3'-phosphate
  modified_base 4: mod_base = OTHER; note = 2'-O-methyluridine-3'-phosphate
  modified_base 5: mod_base = OTHER; note = 2'-O-methyladenosine-3'-phosphate
  modified_base 6: mod_base = OTHER; note = 2'-deoxy-2'-fluorouridine-3'-phosphate
  modified_base 7: mod_base = OTHER; note = 2'-O-methylcytidine-3'-phosphate
  modified_base 8: mod_base = OTHER; note = 2'-O-methyluridine-3'-phosphate
  modified_base 9: mod_base = OTHER; note = 2'-O-methyluridine-3'-phosphate
  modified_base 10: mod_base = OTHER; note = 2'-O-methyladenosine-3'-phosphate
  modified_base 11: mod_base = OTHER; note = 2'-O-methylcytidine-3'-phosphate
  modified_base 12: mod_base = OTHER; note = 2'-O-methyladenosine-3'-phosphate
  modified_base 13: mod_base = OTHER; note = 2'-O-methylguanosine-3'-phosphate
  modified_base 14: mod_base = OTHER; note = 2'-deoxy-2'-fluorouridine-3'-phosphate
  modified_base 15: mod_base = OTHER; note = 2'-O-methyladenosine-3'-phosphate
  modified_base 16: mod_base = OTHER; note = 2'-deoxy-2'-fluorocytidine-3'-phosphate
  modified_base 17: mod_base = OTHER; note = 2'-O-methyluridine-3'-phosphate
  modified_base 18: mod_base = OTHER; note = 2'-O-methylcytidine-3'-phosphate
  modified_base 19: mod_base = OTHER; note = 2'-O-methylcytidine-3'-phosphate
  modified_base 20: mod_base = OTHER; note = 2'-O-methylcytidine-3'-phosphate
  modified_base 21: mod_base = OTHER; note = 2'-O-methyladenosine-3'-phosphate
  modified_base 22: mod_base = OTHER; note = 2'-O-methylcytidine-3'-phosphate
  modified_base 23: mod_base = OTHER; note = 2'-O-methylcytidine
tggtatcttacagtactcccacc

SEQ ID NO: 4922 - RNA, 23 nt, synthetic construct
  source 1..23: mol_type = other RNA
  modified_base 1: mod_base = OTHER; note = 2'-O-methyluridine-3'-phosphate 5'phosphate
  modified_base 2: mod_base = OTHER; note = 2'-deoxy-2'-fluoroadenosine-3'-phosphate
  modified_base 3: mod_base = OTHER; note = 2'-O-methylcytidine-3'-phosphate
  modified_base 4: mod_base = OTHER; note = 2'-O-methylguanosine-3'-phosphate
  modified_base 5: mod_base = OTHER; note = 2'-O-methylguanosine-3'-phosphate
  modified_base 6: mod_base = OTHER; note = 2'-deoxy-2'-fluorouridine-3'-phosphate
  modified_base 7: mod_base = OTHER; note = 2'-O-methyladenosine-3'-phosphate
  modified_base 8: mod_base = OTHER; note = 2'-O-methyluridine-3'-phosphate
  modified_base 9: mod_base = OTHER; note = 2'-O-methylcytidine-3'-phosphate
  modified_base 10: mod_base = OTHER; note = 2'-O-methyluridine-3'-phosphate
  modified_base 11: mod_base = OTHER; note = 2'-O-methyluridine-3'-phosphate
  modified_base 12: mod_base = OTHER; note = 2'-O-methyladenosine-3'-phosphate
  modified_base 13: mod_base = OTHER; note = 2'-O-methylcytidine-3'-phosphate
  modified_base 14: mod_base = OTHER; note = 2'-deoxy-2'-fluoroadenosine-3'-phosphate
  modified_base 15: mod_base = OTHER; note = 2'-O-methylguanosine-3'-phosphate
  modified_base 16: mod_base = OTHER; note = 2'-deoxy-2'-fluorouridine-3'-phosphate
  modified_base 17: mod_base = OTHER; note = 2'-O-methyladenosine-3'-phosphate
  modified_base 18: mod_base = OTHER; note = 2'-O-methylcytidine-3'-phosphate
  modified_base 19: mod_base = OTHER; note = 2'-O-methyluridine-3'-phosphate
  modified_base 20: mod_base = OTHER; note = 2'-O-methylcytidine-3'-phosphate
  modified_base 21: mod_base = OTHER; note = 2'-O-methylcytidine-3'-phosphate
  modified_base 22: mod_base = OTHER; note = 2'-O-methylcytidine-3'-phosphate
  modified_base 23: mod_base = OTHER; note = 2'-O-methyladenosine
tacggtatcttacagtactccca

SEQ ID NO: 4923 - RNA, 23 nt, synthetic construct
  source 1..23: mol_type = other RNA
  modified_base 1: mod_base = OTHER; note = 2'-O-methyluridine-3'-phosphate 5'phosphate
  modified_base 2: mod_base = OTHER; note = 2'-deoxy-2'-fluoroguanosine-3'-phosphate
  modified_base 3: mod_base = OTHER; note = 2'-O-methyladenosine-3'-phosphate
  modified_base 4: mod_base = OTHER; note = 2'-O-methylcytidine-3'-phosphate
  modified_base 5: mod_base = OTHER; note = 2'-O-methylguanosine-3'-phosphate
  modified_base 6: mod_base = OTHER; note = 2'-deoxy-2'-fluoroguanosine-3'-phosphate
  modified_base 7: mod_base = OTHER; note = 2'-O-methyluridine-3'-phosphate
  modified_base 8: mod_base = OTHER; note = 2'-O-methyladenosine-3'-phosphate
  modified_base 9: mod_base = OTHER; note = 2'-O-methyluridine-3'-phosphate
  modified_base 10: mod_base = OTHER; note = 2'-O-methylcytidine-3'-phosphate
  modified_base 11: mod_base = OTHER; note = 2'-O-methyluridine-3'-phosphate
  modified_base 12: mod_base = OTHER; note = 2'-O-methyluridine-3'-phosphate
  modified_base 13: mod_base = OTHER; note = 2'-O-methyladenosine-3'-phosphate
  modified_base 14: mod_base = OTHER; note = 2'-deoxy-2'-fluorocytidine-3'-phosphate
  modified_base 15: mod_base = OTHER; note = 2'-O-methyladenosine-3'-phosphate
  modified_base 16: mod_base = OTHER; note = 2'-deoxy-2'-fluoroguanosine-3'-phosphate
  modified_base 17: mod_base = OTHER; note = 2'-O-methyluridine-3'-phosphate
  modified_base 18: mod_base = OTHER; note = 2'-O-methyladenosine-3'-phosphate
  modified_base 19: mod_base = OTHER; note = 2'-O-methylcytidine-3'-phosphate
  modified_base 20: mod_base = OTHER; note = 2'-O-methyluridine-3'-phosphate
  modified_base 21: mod_base = OTHER; note = 2'-O-methylcytidine-3'-phosphate
  modified_base 22: mod_base = OTHER; note = 2'-O-methylcytidine-3'-phosphate
  modified_base 23: mod_base = OTHER; note = 2'-O-methylcytidine
tgacggtatcttacagtactccc

SEQ ID NO: 4924 - RNA, 23 nt, synthetic construct
  source 1..23: mol_type = other RNA
  modified_base 1: mod_base = OTHER; note = 2'-O-methyluridine-3'-phosphate 5'phosphate
  modified_base 2: mod_base = OTHER; note = 2'-deoxy-2'-fluoroguanosine-3'-phosphate
  modified_base 3: mod_base = OTHER; note = 2'-O-methylguanosine-3'-phosphate
  modified_base 4: mod_base = OTHER; note = 2'-O-methyladenosine-3'-phosphate
  modified_base 5: mod_base = OTHER; note = 2'-O-methylcytidine-3'-phosphate
  modified_base 6: mod_base = OTHER; note = 2'-deoxy-2'-fluoroguanosine-3'-phosphate
  modified_base 7: mod_base = OTHER; note = 2'-O-methylguanosine-3'-phosphate
  modified_base 8: mod_base = OTHER; note = 2'-O-methyluridine-3'-phosphate
  modified_base 9: mod_base = OTHER; note = 2'-O-methyladenosine-3'-phosphate
  modified_base 10: mod_base = OTHER; note = 2'-O-methyluridine-3'-phosphate
  modified_base 11: mod_base = OTHER; note = 2'-O-methylcytidine-3'-phosphate
  modified_base 12: mod_base = OTHER; note = 2'-O-methyluridine-3'-phosphate
  modified_base 13: mod_base = OTHER; note = 2'-O-methyluridine-3'-phosphate
  modified_base 14: mod_base = OTHER; note = 2'-deoxy-2'-fluoroadenosine-3'-phosphate
  modified_base 15: mod_base = OTHER; note = 2'-O-methylcytidine-3'-phosphate
  modified_base 16: mod_base = OTHER; note = 2'-deoxy-2'-fluoroadenosine-3'-phosphate
  modified_base 17: mod_base = OTHER; note = 2'-O-methylguanosine-3'-phosphate
  modified_base 18: mod_base = OTHER; note = 2'-O-methyluridine-3'-phosphate
  modified_base 19: mod_base = OTHER; note = 2'-O-methyladenosine-3'-phosphate
  modified_base 20: mod_base = OTHER; note = 2'-O-methylcytidine-3'-phosphate
  modified_base 21: mod_base = OTHER; note = 2'-O-methyluridine-3'-phosphate
  modified_base 22: mod_base = OTHER; note = 2'-O-methylcytidine-3'-phosphate
  modified_base 23: mod_base = OTHER; note = 2'-O-methylcytidine
tggacggtatcttacagtactcc

SEQ ID NO: 4925 - RNA, 23 nt, synthetic construct
  source 1..23: mol_type = other RNA
  modified_base 1: mod_base = OTHER; note = 2'-O-methyluridine-3'-phosphate 5'phosphate
  modified_base 2: mod_base = OTHER; note = 2'-deoxy-2'-fluoroadenosine-3'-phosphate
  modified_base 3: mod_base = OTHER; note = 2'-O-methylcytidine-3'-phosphate
  modified_base 4: mod_base = OTHER; note = 2'-O-methyladenosine-3'-phosphate
  modified_base 5: mod_base = OTHER; note = 2'-O-methylguanosine-3'-phosphate
  modified_base 6: mod_base = OTHER; note = 2'-deoxy-2'-fluoroguanosine-3'-phosphate
  modified_base 7: mod_base = OTHER; note = 2'-O-methyladenosine-3'-phosphate
  modified_base 8: mod_base = OTHER; note = 2'-O-methylcytidine-3'-phosphate
  modified_base 9: mod_base = OTHER; note = 2'-O-methylguanosine-3'-phosphate
  modified_base 10: mod_base = OTHER; note = 2'-O-methylguanosine-3'-phosphate
  modified_base 11: mod_base = OTHER; note = 2'-O-methyluridine-3'-phosphate
  modified_base 12: mod_base = OTHER; note = 2'-O-methyladenosine-3'-phosphate
  modified_base 13: mod_base = OTHER; note = 2'-O-methyluridine-3'-phosphate
  modified_base 14: mod_base = OTHER; note = 2'-deoxy-2'-fluorocytidine-3'-phosphate
  modified_base 15: mod_base = OTHER; note = 2'-O-methyluridine-3'-phosphate
  modified_base 16: mod_base = OTHER; note = 2'-deoxy-2'-fluorouridine-3'-phosphate
  modified_base 17: mod_base = OTHER; note = 2'-O-methyladenosine-3'-phosphate
  modified_base 18: mod_base = OTHER; note = 2'-O-methylcytidine-3'-phosphate
  modified_base 19: mod_base = OTHER; note = 2'-O-methyladenosine-3'-phosphate
  modified_base 20: mod_base = OTHER; note = 2'-O-methylguanosine-3'-phosphate
  modified_base 21: mod_base = OTHER; note = 2'-O-methyluridine-3'-phosphate
  modified_base 22: mod_base = OTHER; note = 2'-O-methyladenosine-3'-phosphate
  modified_base 23: mod_base = OTHER; note = 2'-O-methylcytidine
tacaggacggtatcttacagtac

SEQ ID NO: 4926 - RNA, 23 nt, synthetic construct
  source 1..23: mol_type = other RNA
  modified_base 1: mod_base = OTHER; note = 2'-O-methyluridine-3'-phosphate 5'phosphate
  modified_base 2: mod_base = OTHER; note = 2'-deoxy-2'-fluorocytidine-3'-phosphate
  modified_base 3: mod_base = OTHER; note = 2'-O-methyladenosine-3'-phosphate
  modified_base 4: mod_base = OTHER; note = 2'-O-methylcytidine-3'-phosphate
  modified_base 5: mod_base = OTHER; note = 2'-O-methyladenosine-3'-phosphate
  modified_base 6: mod_base = OTHER; note = 2'-deoxy-2'-fluoroguanosine-3'-phosphate
  modified_base 7: mod_base = OTHER; note = 2'-O-methylguanosine-3'-phosphate
  modified_base 8: mod_base = OTHER; note = 2'-O-methyladenosine-3'-phosphate
  modified_base 9: mod_base = OTHER; note = 2'-O-methylcytidine-3'-phosphate
  modified_base 10: mod_base = OTHER; note = 2'-O-methylguanosine-3'-phosphate
  modified_base 11: mod_base = OTHER; note = 2'-O-methylguanosine-3'-phosphate
  modified_base 12: mod_base = OTHER; note = 2'-O-methyluridine-3'-phosphate
  modified_base 13: mod_base = OTHER; note = 2'-O-methyladenosine-3'-phosphate
  modified_base 14: mod_base = OTHER; note = 2'-deoxy-2'-fluorouridine-3'-phosphate
  modified_base 15: mod_base = OTHER; note = 2'-O-methylcytidine-3'-phosphate
  modified_base 16: mod_base = OTHER; note = 2'-deoxy-2'-fluorouridine-3'-phosphate
  modified_base 17: mod_base = OTHER; note = 2'-O-methyluridine-3'-phosphate
  modified_base 18: mod_base = OTHER; note = 2'-O-methyladenosine-3'-phosphate
  modified_base 19: mod_base = OTHER; note = 2'-O-methylcytidine-3'-phosphate
  modified_base 20: mod_base = OTHER; note = 2'-O-methyladenosine-3'-phosphate
  modified_base 21: mod_base = OTHER; note = 2'-O-methylguanosine-3'-phosphate
  modified_base 22: mod_base = OTHER; note = 2'-O-methyluridine-3'-phosphate
  modified_base 23: mod_base = OTHER; note = 2'-O-methyladenosine
tcacaggacggtatcttacagta

SEQ ID NO: 4927 - RNA, 23 nt, synthetic construct
  source 1..23: mol_type = other RNA
  modified_base 1: mod_base = OTHER; note = 2'-O-methyluridine-3'-phosphate 5'phosphate
  modified_base 2: mod_base = OTHER; note = 2'-deoxy-2'-fluoroguanosine-3'-phosphate
  modified_base 3: mod_base = OTHER; note = 2'-O-methyluridine-3'-phosphate
  modified_base 4: mod_base = OTHER; note = 2'-O-methylcytidine-3'-phosphate
  modified_base 5: mod_base = OTHER; note = 2'-O-methyladenosine-3'-phosphate
  modified_base 6: mod_base = OTHER; note = 2'-deoxy-2'-fluorocytidine-3'-phosphate
  modified_base 7: mod_base = OTHER; note = 2'-O-methyladenosine-3'-phosphate
  modified_base 8: mod_base = OTHER; note = 2'-O-methylguanosine-3'-phosphate
  modified_base 9: mod_base = OTHER; note = 2'-O-methylguanosine-3'-phosphate
  modified_base 10: mod_base = OTHER; note = 2'-O-methyladenosine-3'-phosphate
  modified_base 11: mod_base = OTHER; note = 2'-O-methylcytidine-3'-phosphate
  modified_base 12: mod_base = OTHER; note = 2'-O-methylguanosine-3'-phosphate
  modified_base 13: mod_base = OTHER; note = 2'-O-methylguanosine-3'-phosphate
  modified_base 14: mod_base = OTHER; note = 2'-deoxy-2'-fluorouridine-3'-phosphate
  modified_base 15: mod_base = OTHER; note = 2'-O-methyladenosine-3'-phosphate
  modified_base 16: mod_base = OTHER; note = 2'-deoxy-2'-fluorouridine-3'-phosphate
  modified_base 17: mod_base = OTHER; note = 2'-O-methylcytidine-3'-phosphate
  modified_base 18: mod_base = OTHER; note = 2'-O-methyluridine-3'-phosphate
  modified_base 19: mod_base = OTHER; note = 2'-O-methyluridine-3'-phosphate
  modified_base 20: mod_base = OTHER; note = 2'-O-methyladenosine-3'-phosphate
  modified_base 21: mod_base = OTHER; note = 2'-O-methylcytidine-3'-phosphate
  modified_base 22: mod_base = OTHER; note = 2'-O-methyladenosine-3'-phosphate
  modified_base 23: mod_base = OTHER; note = 2'-O-methylguanosine
tgtcacaggacggtatcttacag

SEQ ID NO: 4928 - RNA, 23 nt, synthetic construct
  source 1..23: mol_type = other RNA
  modified_base 1: mod_base = OTHER; note = 2'-O-methyluridine-3'-phosphate 5'phosphate
  modified_base 2: mod_base = OTHER; note = 2'-deoxy-2'-fluoroguanosine-3'-phosphate
  modified_base 3: mod_base = OTHER; note = 2'-O-methylguanosine-3'-phosphate
  modified_base 4: mod_base = OTHER; note = 2'-O-methyluridine-3'-phosphate
  modified_base 5: mod_base = OTHER; note = 2'-O-methylguanosine-3'-phosphate
  modified_base 6: mod_base = OTHER; note = 2'-deoxy-2'-fluoroguanosine-3'-phosphate
  modified_base 7: mod_base = OTHER; note = 2'-O-methyluridine-3'-phosphate
  modified_base 8: mod_base = OTHER; note = 2'-O-methylguanosine-3'-phosphate
  modified_base 9: mod_base = OTHER; note = 2'-O-methylcytidine-3'-phosphate
  modified_base 10: mod_base = OTHER; note = 2'-O-methyluridine-3'-phosphate
  modified_base 11: mod_base = OTHER; note = 2'-O-methylguanosine-3'-phosphate
  modified_base 12: mod_base = OTHER; note = 2'-O-methyluridine-3'-phosphate
  modified_base 13: mod_base = OTHER; note = 2'-O-methylguanosine-3'-phosphate
  modified_base 14: mod_base = OTHER; note = 2'-deoxy-2'-fluoroguanosine-3'-phosphate
  modified_base 15: mod_base = OTHER; note = 2'-O-methylguanosine-3'-phosphate
  modified_base 16: mod_base = OTHER; note = 2'-deoxy-2'-fluoroadenosine-3'-phosphate
  modified_base 17: mod_base = OTHER; note = 2'-O-methylguanosine-3'-phosphate
  modified_base 18: mod_base = OTHER; note = 2'-O-methylcytidine-3'-phosphate
  modified_base 19: mod_base = OTHER; note = 2'-O-methylcytidine-3'-phosphate
  modified_base 20: mod_base = OTHER; note = 2'-O-methyladenosine-3'-phosphate
  modified_base 21: mod_base = OTHER; note = 2'-O-methyladenosine-3'-phosphate
  modified_base 22: mod_base = OTHER; note = 2'-O-methyluridine-3'-phosphate
  modified_base 23: mod_base = OTHER; note = 2'-O-methyluridine
tggtggtgctgtgggagccaatt

SEQ ID NO: 4929 - RNA, 23 nt, synthetic construct
  source 1..23: mol_type = other RNA
  modified_base 1: mod_base = OTHER; note = 2'-O-methyluridine-3'-phosphate 5'phosphate
  modified_base 2: mod_base = OTHER; note = 2'-deoxy-2'-fluorocytidine-3'-phosphate
  modified_base 3: mod_base = OTHER; note = 2'-O-methyladenosine-3'-phosphate
  modified_base 4: mod_base = OTHER; note = 2'-O-methylguanosine-3'-phosphate
  modified_base 5: mod_base = OTHER; note = 2'-O-methylguanosine-3'-phosphate
  modified_base 6: mod_base = OTHER; note = 2'-deoxy-2'-fluorouridine-3'-phosphate
  modified_base 7: mod_base = OTHER; note = 2'-O-methylguanosine-3'-phosphate
  modified_base 8: mod_base = OTHER; note = 2'-O-methylguanosine-3'-phosphate
  modified_base 9: mod_base = OTHER; note = 2'-O-methyluridine-3'-phosphate
  modified_base 10: mod_base = OTHER; note = 2'-O-methylguanosine-3'-phosphate
  modified_base 11: mod_base = OTHER; note = 2'-O-methylcytidine-3'-phosphate
  modified_base 12: mod_base = OTHER; note = 2'-O-methyluridine-3'-phosphate
  modified_base 13: mod_base = OTHER; note = 2'-O-methylguanosine-3'-phosphate
  modified_base 14: mod_base = OTHER; note = 2'-deoxy-2'-fluorouridine-3'-phosphate
  modified_base 15: mod_base = OTHER; note = 2'-O-methylguanosine-3'-phosphate
  modified_base 16: mod_base = OTHER; note = 2'-deoxy-2'-fluoroguanosine-3'-phosphate
  modified_base 17: mod_base = OTHER; note = 2'-O-methylguanosine-3'-phosphate
  modified_base 18: mod_base = OTHER; note = 2'-O-methyladenosine-3'-phosphate
  modified_base 19: mod_base = OTHER; note = 2'-O-methylguanosine-3'-phosphate
  modified_base 20: mod_base = OTHER; note = 2'-O-methylcytidine-3'-phosphate
  modified_base 21: mod_base = OTHER; note = 2'-O-methylcytidine-3'-phosphate
  modified_base 22: mod_base = OTHER; note = 2'-O-methyladenosine-3'-phosphate
  modified_base 23: mod_base = OTHER; note = 2'-O-methyladenosine
tcaggtggtgctgtgggagccaa

SEQ ID NO: 4930 - RNA, 23 nt, synthetic construct
  source 1..23: mol_type = other RNA
  modified_base 1: mod_base = OTHER; note = 2'-O-methyluridine-3'-phosphate 5'phosphate
  modified_base 2: mod_base = OTHER; note = 2'-deoxy-2'-fluorouridine-3'-phosphate
  modified_base 3: mod_base = OTHER; note = 2'-O-methylcytidine-3'-phosphate
  modified_base 4: mod_base = OTHER; note = 2'-O-methyladenosine-3'-phosphate
  modified_base 5: mod_base = OTHER; note = 2'-O-methylguanosine-3'-phosphate
  modified_base 6: mod_base = OTHER; note = 2'-deoxy-2'-fluoroguanosine-3'-phosphate
  modified_base 7: mod_base = OTHER; note = 2'-O-methyluridine-3'-phosphate
  modified_base 8: mod_base = OTHER; note = 2'-O-methylguanosine-3'-phosphate
  modified_base 9: mod_base = OTHER; note = 2'-O-methylguanosine-3'-phosphate
  modified_base 10: mod_base = OTHER; note = 2'-O-methyluridine-3'-phosphate
  modified_base 11: mod_base = OTHER; note = 2'-O-methylguanosine-3'-phosphate
  modified_base 12: mod_base = OTHER; note = 2'-O-methylcytidine-3'-phosphate
  modified_base 13: mod_base = OTHER; note = 2'-O-methyluridine-3'-phosphate
  modified_base 14: mod_base = OTHER; note = 2'-deoxy-2'-fluoroguanosine-3'-phosphate
  modified_base 15: mod_base = OTHER; note = 2'-O-methyluridine-3'-phosphate
  modified_base 16: mod_base = OTHER; note = 2'-deoxy-2'-fluoroguanosine-3'-phosphate
  modified_base 17: mod_base = OTHER; note = 2'-O-methylguanosine-3'-phosphate
  modified_base 18: mod_base = OTHER; note = 2'-O-methylguanosine-3'-phosphate
  modified_base 19: mod_base = OTHER; note = 2'-O-methyladenosine-3'-phosphate
  modified_base 20: mod_base = OTHER; note = 2'-O-methylguanosine-3'-phosphate
  modified_base 21: mod_base = OTHER; note = 2'-O-methylcytidine-3'-phosphate
  modified_base 22: mod_base = OTHER; note = 2'-O-methylcytidine-3'-phosphate
  modified_base 23: mod_base = OTHER; note = 2'-O-methyladenosine
ttcaggtggtgctgtgggagcca

SEQ ID NO: 4931 - RNA, 23 nt, synthetic construct
  source 1..23: mol_type = other RNA
  modified_base 1: mod_base = OTHER; note = 2'-O-methyluridine-3'-phosphate 5'phosphate
  modified_base 2: mod_base = OTHER; note = 2'-deoxy-2'-fluoroguanosine-3'-phosphate
  modified_base 3: mod_base = OTHER; note = 2'-O-methyluridine-3'-phosphate
  modified_base 4: mod_base = OTHER; note = 2'-O-methyluridine-3'-phosphate
  modified_base 5: mod_base = OTHER; note = 2'-O-methyladenosine-3'-phosphate
  modified_base 6: mod_base = OTHER; note = 2'-deoxy-2'-fluoroguanosine-3'-phosphate
  modified_base 7: mod_base = OTHER; note = 2'-O-methylcytidine-3'-phosphate
  modified_base 8: mod_base = OTHER; note = 2'-O-methyluridine-3'-phosphate
  modified_base 9: mod_base = OTHER; note = 2'-O-methylcytidine-3'-phosphate
  modified_base 10: mod_base = OTHER; note = 2'-O-methyladenosine-3'-phosphate
  modified_base 11: mod_base = OTHER; note = 2'-O-methylguanosine-3'-phosphate
  modified_base 12: mod_base = OTHER; note = 2'-O-methylguanosine-3'-phosphate
  modified_base 13: mod_base = OTHER; note = 2'-O-methyluridine-3'-phosphate
  modified_base 14: mod_base = OTHER; note = 2'-deoxy-2'-fluoroguanosine-3'-phosphate
  modified_base 15: mod_base = OTHER; note = 2'-O-methylguanosine-3'-phosphate
  modified_base 16: mod_base = OTHER; note = 2'-deoxy-2'-fluorouridine-3'-phosphate
  modified_base 17: mod_base = OTHER; note = 2'-O-methylguanosine-3'-phosphate
  modified_base 18: mod_base = OTHER; note = 2'-O-methylcytidine-3'-phosphate
  modified_base 19: mod_base = OTHER; note = 2'-O-methyluridine-3'-phosphate
  modified_base 20: mod_base = OTHER; note = 2'-O-methylguanosine-3'-phosphate
  modified_base 21: mod_base = OTHER; note = 2'-O-methyluridine-3'-phosphate
  modified_base 22: mod_base = OTHER; note = 2'-O-methylguanosine-3'-phosphate
  modified_base 23: mod_base = OTHER; note = 2'-O-methylguanosine
tgttagctcaggtggtgctgtgg

SEQ ID NO: 4932 - RNA, 23 nt, synthetic construct
  source 1..23: mol_type = other RNA
  modified_base 1: mod_base = OTHER; note = 2'-O-methyluridine-3'-phosphate 5'phosphate
  modified_base 2: mod_base = OTHER; note = 2'-deoxy-2'-fluoroguanosine-3'-phosphate
  modified_base 3: mod_base = OTHER; note = 2'-O-methylguanosine-3'-phosphate
  modified_base 4: mod_base = OTHER; note = 2'-O-methyluridine-3'-phosphate
  modified_base 5: mod_base = OTHER; note = 2'-O-methyluridine-3'-phosphate
  modified_base 6: mod_base = OTHER; note = 2'-deoxy-2'-fluoroadenosine-3'-phosphate
  modified_base 7: mod_base = OTHER; note = 2'-O-methylguanosine-3'-phosphate
  modified_base 8: mod_base = OTHER; note = 2'-O-methylcytidine-3'-phosphate
  modified_base 9: mod_base = OTHER; note = 2'-O-methyluridine-3'-phosphate
  modified_base 10: mod_base = OTHER; note = 2'-O-methylcytidine-3'-phosphate
  modified_base 11: mod_base = OTHER; note = 2'-O-methyladenosine-3'-phosphate
  modified_base 12: mod_base = OTHER; note = 2'-O-methylguanosine-3'-phosphate
  modified_base 13: mod_base = OTHER; note = 2'-O-methylguanosine-3'-phosphate
  modified_base 14: mod_base = OTHER; note = 2'-deoxy-2'-fluorouridine-3'-phosphate
  modified_base 15: mod_base = OTHER; note = 2'-O-methylguanosine-3'-phosphate
  modified_base 16: mod_base = OTHER; note = 2'-deoxy-2'-fluoroguanosine-3'-phosphate
  modified_base 17: mod_base = OTHER; note = 2'-O-methyluridine-3'-phosphate
  modified_base 18: mod_base = OTHER; note = 2'-O-methylguanosine-3'-phosphate
  modified_base 19: mod_base = OTHER; note = 2'-O-methylcytidine-3'-phosphate
  modified_base 20: mod_base = OTHER; note = 2'-O-methyluridine-3'-phosphate
  modified_base 21: mod_base = OTHER; note = 2'-O-methylguanosine-3'-phosphate
  modified_base 22: mod_base = OTHER; note = 2'-O-methyluridine-3'-phosphate
  modified_base 23: mod_base = OTHER; note = 2'-O-methylguanosine
tggttagctcaggtggtgctgtg

SEQ ID NO: 4933 - RNA, 23 nt, synthetic construct
  source 1..23: mol_type = other RNA
  modified_base 1: mod_base = OTHER; note = 2'-O-methyluridine-3'-phosphate 5'phosphate
  modified_base 2: mod_base = OTHER; note = 2'-deoxy-2'-fluorouridine-3'-phosphate
  modified_base 3: mod_base = OTHER; note = 2'-O-methyladenosine-3'-phosphate
  modified_base 4: mod_base = OTHER; note = 2'-O-methylguanosine-3'-phosphate
  modified_base 5: mod_base = OTHER; note = 2'-O-methylcytidine-3'-phosphate
  modified_base 6: mod_base = OTHER; note = 2'-deoxy-2'-fluorouridine-3'-phosphate
  modified_base 7: mod_base = OTHER; note = 2'-O-methylcytidine-3'-phosphate
  modified_base 8: mod_base = OTHER; note = 2'-O-methyluridine-3'-phosphate
  modified_base 9: mod_base = OTHER; note = 2'-O-methylguanosine-3'-phosphate
  modified_base 10: mod_base = OTHER; note = 2'-O-methyluridine-3'-phosphate
  modified_base 11: mod_base = OTHER; note = 2'-O-methylcytidine-3'-phosphate
  modified_base 12: mod_base = OTHER; note = 2'-O-methylcytidine-3'-phosphate
  modified_base 13: mod_base = OTHER; note = 2'-O-methyladenosine-3'-phosphate
  modified_base 14: mod_base = OTHER; note = 2'-deoxy-2'-fluorouridine-3'-phosphate
  modified_base 15: mod_base = OTHER; note = 2'-O-methylcytidine-3'-phosphate
  modified_base 16: mod_base = OTHER; note = 2'-deoxy-2'-fluoroadenosine-3'-phosphate
  modified_base 17: mod_base = OTHER; note = 2'-O-methylcytidine-3'-phosphate
  modified_base 18: mod_base = OTHER; note = 2'-O-methylcytidine-3'-phosphate
  modified_base 19: mod_base = OTHER; note = 2'-O-methyladenosine-3'-phosphate
  modified_base 20: mod_base = OTHER; note = 2'-O-methyluridine-3'-phosphate
  modified_base 21: mod_base = OTHER; note = 2'-O-methylguanosine-3'-phosphate
  modified_base 22: mod_base = OTHER; note = 2'-O-methylguanosine-3'-phosphate
  modified_base 23: mod_base = OTHER; note = 2'-O-methyluridine
ttagctctgtccatcaccatggt

SEQ ID NO: 4934 - RNA, 23 nt, synthetic construct
  source 1..23: mol_type = other RNA
  modified_base 1: mod_base = OTHER; note = 2'-O-methyluridine-3'-phosphate 5'phosphate
  modified_base 2: mod_base = OTHER; note = 2'-deoxy-2'-fluorouridine-3'-phosphate
  modified_base 3: mod_base = OTHER; note = 2'-O-methylguanosine-3'-phosphate
  modified_base 4: mod_base = OTHER; note = 2'-O-methyluridine-3'-phosphate
  modified_base 5: mod_base = OTHER; note = 2'-O-methylguanosine-3'-phosphate
  modified_base 6: mod_base = OTHER; note = 2'-deoxy-2'-fluorocytidine-3'-phosphate
  modified_base 7: mod_base = OTHER; note = 2'-O-methylcytidine-3'-phosphate
  modified_base 8: mod_base = OTHER; note = 2'-O-methyluridine-3'-phosphate
  modified_base 9: mod_base = OTHER; note = 2'-O-methylcytidine-3'-phosphate
  modified_base 10: mod_base = OTHER; note = 2'-O-methylguanosine-3'-phosphate
  modified_base 11: mod_base = OTHER; note = 2'-O-methylguanosine-3'-phosphate
  modified_base 12: mod_base = OTHER; note = 2'-O-methyluridine-3'-phosphate
  modified_base 13: mod_base = OTHER; note = 2'-O-methyladenosine-3'-phosphate
  modified_base 14: mod_base = OTHER; note = 2'-deoxy-2'-fluoroguanosine-3'-phosphate
  modified_base 15: mod_base = OTHER; note = 2'-O-methylcytidine-3'-phosphate
  modified_base 16: mod_base = OTHER; note = 2'-deoxy-2'-fluorouridine-3'-phosphate
  modified_base 17: mod_base = OTHER; note = 2'-O-methylcytidine-3'-phosphate
  modified_base 18: mod_base = OTHER; note = 2'-O-methyluridine-3'-phosphate
  modified_base 19: mod_base = OTHER; note = 2'-O-methylguanosine-3'-phosphate
  modified_base 20: mod_base = OTHER; note = 2'-O-methyluridine-3'-phosphate
  modified_base 21: mod_base = OTHER; note = 2'-O-methylcytidine-3'-phosphate
  modified_base 22: mod_base = OTHER; note = 2'-O-methylcytidine-3'-phosphate
  modified_base 23: mod_base = OTHER; note = 2'-O-methyladenosine
ttgtgcctcggtagctctgtcca

SEQ ID NO: 4935 - RNA, 23 nt, synthetic construct
  source 1..23: mol_type = other RNA
  modified_base 1: mod_base = OTHER; note = 2'-O-methyluridine-3'-phosphate 5'phosphate
  modified_base 2: mod_base = OTHER; note = 2'-deoxy-2'-fluoroadenosine-3'-phosphate
  modified_base 3: mod_base = OTHER; note = 2'-O-methyluridine-3'-phosphate
  modified_base 4: mod_base = OTHER; note = 2'-O-methylguanosine-3'-phosphate
  modified_base 5: mod_base = OTHER; note = 2'-O-methyluridine-3'-phosphate
  modified_base 6: mod_base = OTHER; note = 2'-deoxy-2'-fluoroguanosine-3'-phosphate
  modified_base 7: mod_base = OTHER; note = 2'-O-methylcytidine-3'-phosphate
  modified_base 8: mod_base = OTHER; note = 2'-O-methylcytidine-3'-phosphate
  modified_base 9: mod_base = OTHER; note = 2'-O-methyluridine-3'-phosphate
  modified_base 10: mod_base = OTHER; note = 2'-O-methylcytidine-3'-phosphate
  modified_base 11: mod_base = OTHER; note = 2'-O-methylguanosine-3'-phosphate
  modified_base 12: mod_base = OTHER; note = 2'-O-methylguanosine-3'-phosphate
  modified_base 13: mod_base = OTHER; note = 2'-O-methyluridine-3'-phosphate
  modified_base 14: mod_base = OTHER; note = 2'-deoxy-2'-fluoroadenosine-3'-phosphate
  modified_base 15: mod_base = OTHER; note = 2'-O-methylguanosine-3'-phosphate
  modified_base 16: mod_base = OTHER; note = 2'-deoxy-2'-fluorocytidine-3'-phosphate
  modified_base 17: mod_base = OTHER; note = 2'-O-methyluridine-3'-phosphate
  modified_base 18: mod_base = OTHER; note = 2'-O-methylcytidine-3'-phosphate
  modified_base 19: mod_base = OTHER; note = 2'-O-methyluridine-3'-phosphate
  modified_base 20: mod_base = OTHER; note = 2'-O-methylguanosine-3'-phosphate
  modified_base 21: mod_base = OTHER; note = 2'-O-methyluridine-3'-phosphate
  modified_base 22: mod_base = OTHER; note = 2'-O-methylcytidine-3'-phosphate
  modified_base 23: mod_base = OTHER; note = 2'-O-methylcytidine
tatgtgcctcggtagctctgtcc

SEQ ID NO: 4936 - RNA, 23 nt, synthetic construct
  source 1..23: mol_type = other RNA
  modified_base 1: mod_base = OTHER; note = 2'-O-methyluridine-3'-phosphate 5'phosphate
  modified_base 2: mod_base = OTHER; note = 2'-deoxy-2'-fluoroguanosine-3'-phosphate
  modified_base 3: mod_base = OTHER; note = 2'-O-methyladenosine-3'-phosphate
  modified_base 4: mod_base = OTHER; note = 2'-O-methyluridine-3'-phosphate
  modified_base 5: mod_base = OTHER; note = 2'-O-methylguanosine-3'-phosphate
  modified_base 6: mod_base = OTHER; note = 2'-deoxy-2'-fluorouridine-3'-phosphate
  modified_base 7: mod_base = OTHER; note = 2'-O-methylguanosine-3'-phosphate
  modified_base 8: mod_base = OTHER; note = 2'-O-methylcytidine-3'-phosphate
  modified_base 9: mod_base = OTHER; note = 2'-O-methylcytidine-3'-phosphate
  modified_base 10: mod_base = OTHER; note = 2'-O-methyluridine-3'-phosphate
  modified_base 11: mod_base = OTHER; note = 2'-O-methylcytidine-3'-phosphate
  modified_base 12: mod_base = OTHER; note = 2'-O-methylguanosine-3'-phosphate
  modified_base 13: mod_base = OTHER; note = 2'-O-methylguanosine-3'-phosphate
  modified_base 14: mod_base = OTHER; note = 2'-deoxy-2'-fluorouridine-3'-phosphate
  modified_base 15: mod_base = OTHER; note = 2'-O-methyladenosine-3'-phosphate
  modified_base 16: mod_base = OTHER; note = 2'-deoxy-2'-fluoroguanosine-3'-phosphate
  modified_base 17: mod_base = OTHER; note = 2'-O-methylcytidine-3'-phosphate
  modified_base 18: mod_base = OTHER; note = 2'-O-methyluridine-3'-phosphate
  modified_base 19: mod_base = OTHER; note = 2'-O-methylcytidine-3'-phosphate
  modified_base 20: mod_base = OTHER; note = 2'-O-methyluridine-3'-phosphate
  modified_base 21: mod_base = OTHER; note = 2'-O-methylguanosine-3'-phosphate
  modified_base 22: mod_base = OTHER; note = 2'-O-methyluridine-3'-phosphate
  modified_base 23: mod_base = OTHER; note = 2'-O-methylcytidine
tgatgtgcctcggtagctctgtc

SEQ ID NO: 4937 - RNA, 23 nt, synthetic construct
  source 1..23: mol_type = other RNA
  modified_base 1: mod_base = OTHER; note = 2'-O-methyluridine-3'-phosphate 5'phosphate
  modified_base 2: mod_base = OTHER; note = 2'-deoxy-2'-fluoroadenosine-3'-phosphate
  modified_base 3: mod_base = OTHER; note = 2'-O-methylguanosine-3'-phosphate
  modified_base 4: mod_base = OTHER; note = 2'-O-methylguanosine-3'-phosphate
  modified_base 5: mod_base = OTHER; note = 2'-O-methyladenosine-3'-phosphate
  modified_base 6: mod_base = OTHER; note = 2'-deoxy-2'-fluorouridine-3'-phosphate
  modified_base 7: mod_base = OTHER; note = 2'-O-methylguanosine-3'-phosphate
  modified_base 8: mod_base = OTHER; note = 2'-O-methyluridine-3'-phosphate
  modified_base 9: mod_base = OTHER; note = 2'-O-methylguanosine-3'-phosphate
  modified_base 10: mod_base = OTHER; note = 2'-O-methylcytidine-3'-phosphate
  modified_base 11: mod_base = OTHER; note = 2'-O-methylcytidine-3'-phosphate
  modified_base 12: mod_base = OTHER; note = 2'-O-methyluridine-3'-phosphate
  modified_base 13: mod_base = OTHER; note = 2'-O-methylcytidine-3'-phosphate
  modified_base 14: mod_base = OTHER; note = 2'-deoxy-2'-fluoroguanosine-3'-phosphate
  modified_base 15: mod_base = OTHER; note = 2'-O-methylguanosine-3'-phosphate
  modified_base 16: mod_base = OTHER; note = 2'-deoxy-2'-fluorouridine-3'-phosphate
  modified_base 17: mod_base = OTHER; note = 2'-O-methyladenosine-3'-phosphate
  modified_base 18: mod_base = OTHER; note = 2'-O-methylguanosine-3'-phosphate
  modified_base 19: mod_base = OTHER; note = 2'-O-methylcytidine-3'-phosphate
  modified_base 20: mod_base = OTHER; note = 2'-O-methyluridine-3'-phosphate
  modified_base 21: mod_base = OTHER; note = 2'-O-methylcytidine-3'-phosphate
  modified_base 22: mod_base = OTHER; note = 2'-O-methyluridine-3'-phosphate
  modified_base 23: mod_base = OTHER; note = 2'-O-methylguanosine
taggatgtgcctcggtagctctg

SEQ ID NO: 4938 - RNA, 23 nt, synthetic construct
  source 1..23: mol_type = other RNA
  modified_base 1: mod_base = OTHER; note = 2'-O-methyluridine-3'-phosphate 5'phosphate
  modified_base 2: mod_base = OTHER; note = 2'-deoxy-2'-fluoroguanosine-3'-phosphate
  modified_base 3: mod_base = OTHER; note = 2'-O-methylguanosine-3'-phosphate
  modified_base 4: mod_base = OTHER; note = 2'-O-methyluridine-3'-phosphate
  modified_base 5: mod_base = OTHER; note = 2'-O-methylguanosine-3'-phosphate
  modified_base 6: mod_base = OTHER; note = 2'-deoxy-2'-fluoroguanosine-3'-phosphate
  modified_base 7: mod_base = OTHER; note = 2'-O-methyladenosine-3'-phosphate
  modified_base 8: mod_base = OTHER; note = 2'-O-methylguanosine-3'-phosphate
  modified_base 9: mod_base = OTHER; note = 2'-O-methylguanosine-3'-phosphate
  modified_base 10: mod_base = OTHER; note = 2'-O-methyladenosine-3'-phosphate
  modified_base 11: mod_base = OTHER; note = 2'-O-methyluridine-3'-phosphate
  modified_base 12: mod_base = OTHER; note = 2'-O-methylguanosine-3'-phosphate
  modified_base 13: mod_base = OTHER; note = 2'-O-methyluridine-3'-phosphate
  modified_base 14: mod_base = OTHER; note = 2'-deoxy-2'-fluoroguanosine-3'-phosphate
  modified_base 15: mod_base = OTHER; note = 2'-O-methylcytidine-3'-phosphate
  modified_base 16: mod_base = OTHER; note = 2'-deoxy-2'-fluorocytidine-3'-phosphate
  modified_base 17: mod_base = OTHER; note = 2'-O-methyluridine-3'-phosphate
  modified_base 18: mod_base = OTHER; note = 2'-O-methylcytidine-3'-phosphate
  modified_base 19: mod_base = OTHER; note = 2'-O-methylguanosine-3'-phosphate
  modified_base 20: mod_base = OTHER; note = 2'-O-methylguanosine-3'-phosphate
  modified_base 21: mod_base = OTHER; note = 2'-O-methyluridine-3'-phosphate
  modified_base 22: mod_base = OTHER; note = 2'-O-methyladenosine-3'-phosphate
  modified_base 23: mod_base = OTHER; note = 2'-O-methylguanosine
tggtggaggatgtgcctcggtag

SEQ ID NO: 4939 - RNA, 23 nt, synthetic construct
  source 1..23: mol_type = other RNA
  modified_base 1: mod_base = OTHER; note = 2'-O-methyluridine-3'-phosphate 5'phosphate
  modified_base 2: mod_base = OTHER; note = 2'-deoxy-2'-fluoroguanosine-3'-phosphate
  modified_base 3: mod_base = OTHER; note = 2'-O-methyluridine-3'-phosphate
  modified_base 4: mod_base = OTHER; note = 2'-O-methylguanosine-3'-phosphate
  modified_base 5: mod_base = OTHER; note = 2'-O-methylguanosine-3'-phosphate
  modified_base 6: mod_base = OTHER; note = 2'-deoxy-2'-fluorouridine-3'-phosphate
  modified_base 7: mod_base = OTHER; note = 2'-O-methylguanosine-3'-phosphate
  modified_base 8: mod_base = OTHER; note = 2'-O-methylguanosine-3'-phosphate
  modified_base 9: mod_base = OTHER; note = 2'-O-methyladenosine-3'-phosphate
  modified_base 10: mod_base = OTHER; note = 2'-O-methylguanosine-3'-phosphate
  modified_base 11: mod_base = OTHER; note = 2'-O-methylguanosine-3'-phosphate
  modified_base 12: mod_base = OTHER; note = 2'-O-methyladenosine-3'-phosphate
  modified_base 13: mod_base = OTHER; note = 2'-O-methyluridine-3'-phosphate
  modified_base 14: mod_base = OTHER; note = 2'-deoxy-2'-fluoroguanosine-3'-phosphate
  modified_base 15: mod_base = OTHER; note = 2'-O-methyluridine-3'-phosphate
  modified_base 16: mod_base = OTHER; note = 2'-deoxy-2'-fluoroguanosine-3'-phosphate
  modified_base 17: mod_base = OTHER; note = 2'-O-methylcytidine-3'-phosphate
  modified_base 18: mod_base = OTHER; note = 2'-O-methylcytidine-3'-phosphate
  modified_base 19: mod_base = OTHER; note = 2'-O-methyluridine-3'-phosphate
  modified_base 20: mod_base = OTHER; note = 2'-O-methylcytidine-3'-phosphate
  modified_base 21: mod_base = OTHER; note = 2'-O-methylguanosine-3'-phosphate
  modified_base 22: mod_base = OTHER; note = 2'-O-methylguanosine-3'-phosphate
  modified_base 23: mod_base = OTHER; note = 2'-O-methyluridine
tgtggtggaggatgtgcctcggt

SEQ ID NO: 4940 - RNA, 23 nt, synthetic construct
  source 1..23: mol_type = other RNA
  modified_base 1: mod_base = OTHER; note = 2'-O-methyluridine-3'-phosphate 5'phosphate
  modified_base 2: mod_base = OTHER; note = 2'-deoxy-2'-fluorouridine-3'-phosphate
  modified_base 3: mod_base = OTHER; note = 2'-O-methylguanosine-3'-phosphate
  modified_base 4: mod_base = OTHER; note = 2'-O-methylguanosine-3'-phosphate
  modified_base 5: mod_base = OTHER; note = 2'-O-methyluridine-3'-phosphate
  modified_base 6: mod_base = OTHER; note = 2'-deoxy-2'-fluoroguanosine-3'-phosphate
  modified_base 7: mod_base = OTHER; note = 2'-O-methylguanosine-3'-phosphate
  modified_base 8: mod_base = OTHER; note = 2'-O-methyluridine-3'-phosphate
  modified_base 9: mod_base = OTHER; note = 2'-O-methylguanosine-3'-phosphate
  modified_base 10: mod_base = OTHER; note = 2'-O-methylguanosine-3'-phosphate
  modified_base 11: mod_base = OTHER; note = 2'-O-methyladenosine-3'-phosphate
  modified_base 12: mod_base = OTHER; note = 2'-O-methylguanosine-3'-phosphate
  modified_base 13: mod_base = OTHER; note = 2'-O-methylguanosine-3'-phosphate
  modified_base 14: mod_base = OTHER; note = 2'-deoxy-2'-fluoroadenosine-3'-phosphate
  modified_base 15: mod_base = OTHER; note = 2'-O-methyluridine-3'-phosphate
  modified_base 16: mod_base = OTHER; note = 2'-deoxy-2'-fluoroguanosine-3'-phosphate
  modified_base 17: mod_base = OTHER; note = 2'-O-methyluridine-3'-phosphate
  modified_base 18: mod_base = OTHER; note = 2'-O-methylguanosine-3'-phosphate
  modified_base 19: mod_base = OTHER; note = 2'-O-methylcytidine-3'-phosphate
  modified_base 20: mod_base = OTHER; note = 2'-O-methylcytidine-3'-phosphate
  modified_base 21: mod_base = OTHER; note = 2'-O-methyluridine-3'-phosphate
  modified_base 22: mod_base = OTHER; note = 2'-O-methylcytidine-3'-phosphate
  modified_base 23: mod_base = OTHER; note = 2'-O-methylguanosine
ttggtggtggaggatgtgcctcg

SEQ ID NO: 4941 - RNA, 23 nt, synthetic construct
  source 1..23: mol_type = other RNA
  modified_base 1: mod_base = OTHER; note = 2'-O-methyluridine-3'-phosphate 5'phosphate
  modified_base 2: mod_base = OTHER; note = 2'-deoxy-2'-fluoroguanosine-3'-phosphate
  modified_base 3: mod_base = OTHER; note = 2'-O-methylguanosine-3'-phosphate
  modified_base 4: mod_base = OTHER; note = 2'-O-methyluridine-3'-phosphate
  modified_base 5: mod_base = OTHER; note = 2'-O-methylguanosine-3'-phosphate
  modified_base 6: mod_base = OTHER; note = 2'-deoxy-2'-fluoroguanosine-3'-phosphate
  modified_base 7: mod_base = OTHER; note = 2'-O-methyluridine-3'-phosphate
  modified_base 8: mod_base = OTHER; note = 2'-O-methylguanosine-3'-phosphate
  modified_base 9: mod_base = OTHER; note = 2'-O-methylguanosine-3'-phosphate
  modified_base 10: mod_base = OTHER; note = 2'-O-methyluridine-3'-phosphate
  modified_base 11: mod_base = OTHER; note = 2'-O-methylguanosine-3'-phosphate
  modified_base 12: mod_base = OTHER; note = 2'-O-methylguanosine-3'-phosphate
  modified_base 13: mod_base = OTHER; note = 2'-O-methyladenosine-3'-phosphate
  modified_base 14: mod_base = OTHER; note = 2'-deoxy-2'-fluoroguanosine-3'-phosphate
  modified_base 15: mod_base = OTHER; note = 2'-O-methylguanosine-3'-phosphate
  modified_base 16: mod_base = OTHER; note = 2'-deoxy-2'-fluoroadenosine-3'-phosphate
  modified_base 17: mod_base = OTHER; note = 2'-O-methyluridine-3'-phosphate
  modified_base 18: mod_base = OTHER; note = 2'-O-methylguanosine-3'-phosphate
  modified_base 19: mod_base = OTHER; note = 2'-O-methyluridine-3'-phosphate
  modified_base 20: mod_base = OTHER; note = 2'-O-methylguanosine-3'-phosphate
  modified_base 21: mod_base = OTHER; note = 2'-O-methylcytidine-3'-phosphate
  modified_base 22: mod_base = OTHER; note = 2'-O-methylcytidine-3'-phosphate
  modified_base 23: mod_base = OTHER; note = 2'-O-methyluridine
tggtggtggtggaggatgtgcct

SEQ ID NO: 4942 - RNA, 23 nt, synthetic construct
  source 1..23: mol_type = other RNA
  modified_base 1: mod_base = OTHER; note = 2'-O-methyluridine-3'-phosphate 5'phosphate
  modified_base 2: mod_base = OTHER; note = 2'-deoxy-2'-fluorouridine-3'-phosphate
  modified_base 3: mod_base = OTHER; note = 2'-O-methylguanosine-3'-phosphate
  modified_base 4: mod_base = OTHER; note = 2'-O-methyluridine-3'-phosphate
  modified_base 5: mod_base = OTHER; note = 2'-O-methylguanosine-3'-phosphate
  modified_base 6: mod_base = OTHER; note = 2'-deoxy-2'-fluoroguanosine-3'-phosphate
  modified_base 7: mod_base = OTHER; note = 2'-O-methyluridine-3'-phosphate
  modified_base 8: mod_base = OTHER; note = 2'-O-methylguanosine-3'-phosphate
  modified_base 9: mod_base = OTHER; note = 2'-O-methylguanosine-3'-phosphate
  modified_base 10: mod_base = OTHER; note = 2'-O-methyluridine-3'-phosphate
  modified_base 11: mod_base = OTHER; note = 2'-O-methylguanosine-3'-phosphate
  modified_base 12: mod_base = OTHER; note = 2'-O-methylguanosine-3'-phosphate
  modified_base 13: mod_base = OTHER; note = 2'-O-methyluridine-3'-phosphate
  modified_base 14: mod_base = OTHER; note = 2'-deoxy-2'-fluoroguanosine-3'-phosphate
  modified_base 15: mod_base = OTHER; note = 2'-O-methylguanosine-3'-phosphate
  modified_base 16: mod_base = OTHER; note = 2'-deoxy-2'-fluoroadenosine-3'-phosphate
  modified_base 17: mod_base = OTHER; note = 2'-O-methylguanosine-3'-phosphate
  modified_base 18: mod_base = OTHER; note = 2'-O-methylguanosine-3'-phosphate
  modified_base 19: mod_base = OTHER; note = 2'-O-methyladenosine-3'-phosphate
  modified_base 20: mod_base = OTHER; note = 2'-O-methyluridine-3'-phosphate
  modified_base 21: mod_base = OTHER; note = 2'-O-methylguanosine-3'-phosphate
  modified_base 22: mod_base = OTHER; note = 2'-O-methyluridine-3'-phosphate
  modified_base 23: mod_base = OTHER; note = 2'-O-methylguanosine
ttgtggtggtggtggaggatgtg

SEQ ID NO: 4943 - RNA, 23 nt, synthetic construct
  source 1..23: mol_type = other RNA
  modified_base 1: mod_base = OTHER; note = 2'-O-methyluridine-3'-phosphate 5'phosphate
  modified_base 2: mod_base = OTHER; note = 2'-deoxy-2'-fluorocytidine-3'-phosphate
  modified_base 3: mod_base = OTHER; note = 2'-O-methyluridine-3'-phosphate
  modified_base 4: mod_base = OTHER; note = 2'-O-methylguanosine-3'-phosphate
  modified_base 5: mod_base = OTHER; note = 2'-O-methyluridine-3'-phosphate
  modified_base 6: mod_base = OTHER; note = 2'-deoxy-2'-fluoroguanosine-3'-phosphate
  modified_base 7: mod_base = OTHER; note = 2'-O-methylguanosine-3'-phosphate
  modified_base 8: mod_base = OTHER; note = 2'-O-methyluridine-3'-phosphate
  modified_base 9: mod_base = OTHER; note = 2'-O-methylguanosine-3'-phosphate
  modified_base 10: mod_base = OTHER; note = 2'-O-methylguanosine-3'-phosphate
  modified_base 11: mod_base = OTHER; note = 2'-O-methyluridine-3'-phosphate
  modified_base 12: mod_base = OTHER; note = 2'-O-methylguanosine-3'-phosphate
  modified_base 13: mod_base = OTHER; note = 2'-O-methylguanosine-3'-phosphate
  modified_base 14: mod_base = OTHER; note = 2'-deoxy-2'-fluorouridine-3'-phosphate
  modified_base 15: mod_base = OTHER; note = 2'-O-methylguanosine-3'-phosphate
  modified_base 16: mod_base = OTHER; note = 2'-deoxy-2'-fluoroguanosine-3'-phosphate
  modified_base 17: mod_base = OTHER; note = 2'-O-methyladenosine-3'-phosphate
  modified_base 18: mod_base = OTHER; note = 2'-O-methylguanosine-3'-phosphate
  modified_base 19: mod_base = OTHER; note = 2'-O-methylguanosine-3'-phosphate
  modified_base 20: mod_base = OTHER; note = 2'-O-methyladenosine-3'-phosphate
  modified_base 21: mod_base = OTHER; note = 2'-O-methyluridine-3'-phosphate
  modified_base 22: mod_base = OTHER; note = 2'-O-methylguanosine-3'-phosphate
  modified_base 23: mod_base = OTHER; note = 2'-O-methyluridine
tctgtggtggtggtggaggatgt

SEQ ID NO: 4944 - RNA, 23 nt, synthetic construct
  source 1..23: mol_type = other RNA
  modified_base 1: mod_base = OTHER; note = 2'-O-methyluridine-3'-phosphate 5'phosphate
  modified_base 2: mod_base = OTHER; note = 2'-deoxy-2'-fluorocytidine-3'-phosphate
  modified_base 3: mod_base = OTHER; note = 2'-O-methylcytidine-3'-phosphate
  modified_base 4: mod_base = OTHER; note = 2'-O-methyluridine-3'-phosphate
  modified_base 5: mod_base = OTHER; note = 2'-O-methylguanosine-3'-phosphate
  modified_base 6: mod_base = OTHER; note = 2'-deoxy-2'-fluorouridine-3'-phosphate
  modified_base 7: mod_base = OTHER; note = 2'-O-methylguanosine-3'-phosphate
  modified_base 8: mod_base = OTHER; note = 2'-O-methylguanosine-3'-phosphate
  modified_base 9: mod_base = OTHER; note = 2'-O-methyluridine-3'-phosphate
  modified_base 10: mod_base = OTHER; note = 2'-O-methylguanosine-3'-phosphate
  modified_base 11: mod_base = OTHER; note = 2'-O-methylguanosine-3'-phosphate
  modified_base 12: mod_base = OTHER; note = 2'-O-methyluridine-3'-phosphate
  modified_base 13: mod_base = OTHER; note = 2'-O-methylguanosine-3'-phosphate
  modified_base 14: mod_base = OTHER; note = 2'-deoxy-2'-fluoroguanosine-3'-phosphate
  modified_base 15: mod_base = OTHER; note = 2'-O-methyluridine-3'-phosphate
  modified_base 16: mod_base = OTHER; note = 2'-deoxy-2'-fluoroguanosine-3'-phosphate
  modified_base 17: mod_base = OTHER; note = 2'-O-methylguanosine-3'-phosphate
  modified_base 18: mod_base = OTHER; note = 2'-O-methyladenosine-3'-phosphate
  modified_base 19: mod_base = OTHER; note = 2'-O-methylguanosine-3'-phosphate
  modified_base 20: mod_base = OTHER; note = 2'-O-methylguanosine-3'-phosphate
  modified_base 21: mod_base = OTHER; note = 2'-O-methyladenosine-3'-phosphate
  modified_base 22: mod_base = OTHER; note = 2'-O-methyluridine-3'-phosphate
  modified_base 23: mod_base = OTHER; note = 2'-O-methylguanosine
tcctgtggtggtggtggaggatg

SEQ ID NO: 4945 - RNA, 23 nt, synthetic construct
  source 1..23: mol_type = other RNA
  modified_base 1: mod_base = OTHER; note = 2'-O-methyluridine-3'-phosphate 5'phosphate
  modified_base 2: mod_base = OTHER; note = 2'-deoxy-2'-fluorouridine-3'-phosphate
  modified_base 3: mod_base = OTHER; note = 2'-O-methylcytidine-3'-phosphate
  modified_base 4: mod_base = OTHER; note = 2'-O-methylcytidine-3'-phosphate
  modified_base 5: mod_base = OTHER; note = 2'-O-methyluridine-3'-phosphate
  modified_base 6: mod_base = OTHER; note = 2'-deoxy-2'-fluoroguanosine-3'-phosphate
  modified_base 7: mod_base = OTHER; note = 2'-O-methyluridine-3'-phosphate
  modified_base 8: mod_base = OTHER; note = 2'-O-methylguanosine-3'-phosphate
  modified_base 9: mod_base = OTHER; note = 2'-O-methylguanosine-3'-phosphate
  modified_base 10: mod_base = OTHER; note = 2'-O-methyluridine-3'-phosphate
  modified_base 11: mod_base = OTHER; note = 2'-O-methylguanosine-3'-phosphate
  modified_base 12: mod_base = OTHER; note = 2'-O-methylguanosine-3'-phosphate
  modified_base 13: mod_base = OTHER; note = 2'-O-methyluridine-3'-phosphate
  modified_base 14: mod_base = OTHER; note = 2'-deoxy-2'-fluoroguanosine-3'-phosphate
  modified_base 15: mod_base = OTHER; note = 2'-O-methylguanosine-3'-phosphate
  modified_base 16: mod_base = OTHER; note = 2'-deoxy-2'-fluorouridine-3'-phosphate
  modified_base 17: mod_base = OTHER; note = 2'-O-methylguanosine-3'-phosphate
  modified_base 18: mod_base = OTHER; note = 2'-O-methylguanosine-3'-phosphate
  modified_base 19: mod_base = OTHER; note = 2'-O-methyladenosine-3'-phosphate
  modified_base 20: mod_base = OTHER; note = 2'-O-methylguanosine-3'-phosphate
  modified_base 21: mod_base = OTHER; note = 2'-O-methylguanosine-3'-phosphate
  modified_base 22: mod_base = OTHER; note = 2'-O-methyladenosine-3'-phosphate
  modified_base 23: mod_base = OTHER; note = 2'-O-methyluridine
ttcctgtggtggtggtggaggat

SEQ ID NO: 4946 - RNA, 23 nt, synthetic construct
  source 1..23: mol_type = other RNA
  modified_base 1: mod_base = OTHER; note = 2'-O-methyluridine-3'-phosphate 5'phosphate
  modified_base 2: mod_base = OTHER; note = 2'-deoxy-2'-fluorouridine-3'-phosphate
  modified_base 3: mod_base = OTHER; note = 2'-O-methyluridine-3'-phosphate
  modified_base 4: mod_base = OTHER; note = 2'-O-methylcytidine-3'-phosphate
  modified_base 5: mod_base = OTHER; note = 2'-O-methylcytidine-3'-phosphate
  modified_base 6: mod_base = OTHER; note = 2'-deoxy-2'-fluorouridine-3'-phosphate
  modified_base 7: mod_base = OTHER; note = 2'-O-methylguanosine-3'-phosphate
  modified_base 8: mod_base = OTHER; note = 2'-O-methyluridine-3'-phosphate
  modified_base 9: mod_base = OTHER; note = 2'-O-methylguanosine-3'-phosphate
  modified_base 10: mod_base = OTHER; note = 2'-O-methylguanosine-3'-phosphate
  modified_base 11: mod_base = OTHER; note = 2'-O-methyluridine-3'-phosphate
  modified_base 12: mod_base = OTHER; note = 2'-O-methylguanosine-3'-phosphate
  modified_base 13: mod_base = OTHER; note = 2'-O-methylguanosine-3'-phosphate
  modified_base 14: mod_base = OTHER; note = 2'-deoxy-2'-fluorouridine-3'-phosphate
  modified_base 15: mod_base = OTHER; note = 2'-O-methylguanosine-3'-phosphate
  modified_base 16: mod_base = OTHER; note = 2'-deoxy-2'-fluoroguanosine-3'-phosphate
  modified_base 17: mod_base = OTHER; note = 2'-O-methyluridine-3'-phosphate
  modified_base 18: mod_base = OTHER; note = 2'-O-methylguanosine-3'-phosphate
  modified_base 19: mod_base = OTHER; note = 2'-O-methylguanosine-3'-phosphate
  modified_base 20: mod_base = OTHER; note = 2'-O-methyladenosine-3'-phosphate
  modified_base 21: mod_base = OTHER; note = 2'-O-methylguanosine-3'-phosphate
  modified_base 22: mod_base = OTHER; note = 2'-O-methylguanosine-3'-phosphate
  modified_base 23: mod_base = OTHER; note = 2'-O-methyladenosine
tttcctgtggtggtggtggagga

SEQ ID NO: 4947 - RNA, 23 nt, synthetic construct
  source 1..23: mol_type = other RNA
  modified_base 1: mod_base = OTHER; note = 2'-O-methyluridine-3'-phosphate 5'phosphate
  modified_base 2: mod_base = OTHER; note = 2'-deoxy-2'-fluorouridine-3'-phosphate
  modified_base 3: mod_base = OTHER; note = 2'-O-methyluridine-3'-phosphate
  modified_base 4: mod_base = OTHER; note = 2'-O-methyluridine-3'-phosphate
  modified_base 5: mod_base = OTHER; note = 2'-O-methylcytidine-3'-phosphate
  modified_base 6: mod_base = OTHER; note = 2'-deoxy-2'-fluorocytidine-3'-phosphate
  modified_base 7: mod_base = OTHER; note = 2'-O-methyluridine-3'-phosphate
  modified_base 8: mod_base = OTHER; note = 2'-O-methylguanosine-3'-phosphate
  modified_base 9: mod_base = OTHER; note = 2'-O-methyluridine-3'-phosphate
  modified_base 10: mod_base = OTHER; note = 2'-O-methylguanosine-3'-phosphate
  modified_base 11: mod_base = OTHER; note = 2'-O-methylguanosine-3'-phosphate
  modified_base 12: mod_base = OTHER; note = 2'-O-methyluridine-3'-phosphate
  modified_base 13: mod_base = OTHER; note = 2'-O-methylguanosine-3'-phosphate
  modified_base 14: mod_base = OTHER; note = 2'-deoxy-2'-fluoroguanosine-3'-phosphate
  modified_base 15: mod_base = OTHER; note = 2'-O-methyluridine-3'-phosphate
  modified_base 16: mod_base = OTHER; note = 2'-deoxy-2'-fluoroguanosine-3'-phosphate
  modified_base 17: mod_base = OTHER; note = 2'-O-methylguanosine-3'-phosphate
  modified_base 18: mod_base = OTHER; note = 2'-O-methyluridine-3'-phosphate
  modified_base 19: mod_base = OTHER; note = 2'-O-methylguanosine-3'-phosphate
  modified_base 20: mod_base = OTHER; note = 2'-O-methylguanosine-3'-phosphate
  modified_base 21: mod_base = OTHER; note = 2'-O-methyladenosine-3'-phosphate
  modified_base 22: mod_base = OTHER; note = 2'-O-methylguanosine-3'-phosphate
  modified_base 23: mod_base = OTHER; note = 2'-O-methylguanosine
ttttcctgtggtggtggtggagg

SEQ ID NO: 4948 - RNA, 23 nt, synthetic construct
  source 1..23: mol_type = other RNA
  modified_base 1: mod_base = OTHER; note = 2'-O-methyluridine-3'-phosphate 5'phosphate
  modified_base 2: mod_base = OTHER; note = 2'-deoxy-2'-fluorocytidine-3'-phosphate
  modified_base 3: mod_base = OTHER; note = 2'-O-methyluridine-3'-phosphate
  modified_base 4: mod_base = OTHER; note = 2'-O-methyluridine-3'-phosphate
  modified_base 5: mod_base = OTHER; note = 2'-O-methyluridine-3'-phosphate
  modified_base 6: mod_base = OTHER; note = 2'-deoxy-2'-fluorocytidine-3'-phosphate
  modified_base 7: mod_base = OTHER; note = 2'-O-methylcytidine-3'-phosphate
  modified_base 8: mod_base = OTHER; note = 2'-O-methyluridine-3'-phosphate
  modified_base 9: mod_base = OTHER; note = 2'-O-methylguanosine-3'-phosphate
  modified_base 10: mod_base = OTHER; note = 2'-O-methyluridine-3'-phosphate
  modified_base 11: mod_base = OTHER; note = 2'-O-methylguanosine-3'-phosphate
  modified_base 12: mod_base = OTHER; note = 2'-O-methylguanosine-3'-phosphate
  modified_base 13: mod_base = OTHER; note = 2'-O-methyluridine-3'-phosphate
  modified_base 14: mod_base = OTHER; note = 2'-deoxy-2'-fluoroguanosine-3'-phosphate
  modified_base 15: mod_base = OTHER; note = 2'-O-methylguanosine-3'-phosphate
  modified_base 16: mod_base = OTHER; note = 2'-deoxy-2'-fluorouridine-3'-phosphate
  modified_base 17: mod_base = OTHER; note = 2'-O-methylguanosine-3'-phosphate
  modified_base 18: mod_base = OTHER; note = 2'-O-methylguanosine-3'-phosphate
  modified_base 19: mod_base = OTHER; note = 2'-O-methyluridine-3'-phosphate
  modified_base 20: mod_base = OTHER; note = 2'-O-methylguanosine-3'-phosphate
  modified_base 21: mod_base = OTHER; note = 2'-O-methylguanosine-3'-phosphate
  modified_base 22: mod_base = OTHER; note = 2'-O-methyladenosine-3'-phosphate
  modified_base 23: mod_base = OTHER; note = 2'-O-methylguanosine
tctttcctgtggtggtggtggag

SEQ ID NO: 4949 - RNA, 23 nt, synthetic construct
  source 1..23: mol_type = other RNA
  modified_base 1: mod_base = OTHER; note = 2'-O-methyluridine-3'-phosphate 5'phosphate
  modified_base 2: mod_base = OTHER; note = 2'-deoxy-2'-fluorouridine-3'-phosphate
  modified_base 3: mod_base = OTHER; note = 2'-O-methylcytidine-3'-phosphate
  modified_base 4: mod_base = OTHER; note = 2'-O-methyluridine-3'-phosphate
  modified_base 5: mod_base = OTHER; note = 2'-O-methyluridine-3'-phosphate
  modified_base 6: mod_base = OTHER; note = 2'-deoxy-2'-fluorouridine-3'-phosphate
  modified_base 7: mod_base = OTHER; note = 2'-O-methylcytidine-3'-phosphate
  modified_base 8: mod_base = OTHER; note = 2'-O-methylcytidine-3'-phosphate
  modified_base 9: mod_base = OTHER; note = 2'-O-methyluridine-3'-phosphate
  modified_base 10: mod_base = OTHER; note = 2'-O-methylguanosine-3'-phosphate
  modified_base 11: mod_base = OTHER; note = 2'-O-methyluridine-3'-phosphate
  modified_base 12: mod_base = OTHER; note = 2'-O-methylguanosine-3'-phosphate
  modified_base 13: mod_base = OTHER; note = 2'-O-methylguanosine-3'-phosphate
  modified_base 14: mod_base = OTHER; note = 2'-deoxy-2'-fluorouridine-3'-phosphate
  modified_base 15: mod_base = OTHER; note = 2'-O-methylguanosine-3'-phosphate
  modified_base 16: mod_base = OTHER; note = 2'-deoxy-2'-fluoroguanosine-3'-phosphate
  modified_base 17: mod_base = OTHER; note = 2'-O-methyluridine-3'-phosphate
  modified_base 18: mod_base = OTHER; note = 2'-O-methylguanosine-3'-phosphate
  modified_base 19: mod_base = OTHER; note = 2'-O-methylguanosine-3'-phosphate
  modified_base 20: mod_base = OTHER; note = 2'-O-methyluridine-3'-phosphate
  modified_base 21: mod_base = OTHER; note = 2'-O-methylguanosine-3'-phosphate
  modified_base 22: mod_base = OTHER; note = 2'-O-methylguanosine-3'-phosphate
  modified_base 23: mod_base = OTHER; note = 2'-O-methyladenosine
ttctttcctgtggtggtggtgga

SEQ ID NO: 4950 - RNA, 23 nt, synthetic construct
  source 1..23: mol_type = other RNA
  modified_base 1: mod_base = OTHER; note = 2'-O-methyluridine-3'-phosphate 5'phosphate
  modified_base 2: mod_base = OTHER; note = 2'-deoxy-2'-fluorouridine-3'-phosphate
  modified_base 3: mod_base = OTHER; note = 2'-O-methyluridine-3'-phosphate
  modified_base 4: mod_base = OTHER; note = 2'-O-methylcytidine-3'-phosphate
  modified_base 5: mod_base = OTHER; note = 2'-O-methyluridine-3'-phosphate
  modified_base 6: mod_base = OTHER; note = 2'-deoxy-2'-fluorouridine-3'-phosphate
  modified_base 7: mod_base = OTHER; note = 2'-O-methyluridine-3'-phosphate
  modified_base 8: mod_base = OTHER; note = 2'-O-methylcytidine-3'-phosphate
  modified_base 9: mod_base = OTHER; note = 2'-O-methylcytidine-3'-phosphate
  modified_base 10: mod_base = OTHER; note = 2'-O-methyluridine-3'-phosphate
  modified_base 11: mod_base = OTHER; note = 2'-O-methylguanosine-3'-phosphate
  modified_base 12: mod_base = OTHER; note = 2'-O-methyluridine-3'-phosphate
  modified_base 13: mod_base = OTHER; note = 2'-O-methylguanosine-3'-phosphate
  modified_base 14: mod_base = OTHER; note = 2'-deoxy-2'-fluoroguanosine-3'-phosphate
  modified_base 15: mod_base = OTHER; note = 2'-O-methyluridine-3'-phosphate
  modified_base 16: mod_base = OTHER; note = 2'-deoxy-2'-fluoroguanosine-3'-phosphate
  modified_base 17: mod_base = OTHER; note = 2'-O-methylguanosine-3'-phosphate
  modified_base 18: mod_base = OTHER; note = 2'-O-methyluridine-3'-phosphate
  modified_base 19: mod_base = OTHER; note = 2'-O-methylguanosine-3'-phosphate
  modified_base 20: mod_base = OTHER; note = 2'-O-methylguanosine-3'-phosphate
  modified_base 21: mod_base = OTHER; note = 2'-O-methyluridine-3'-phosphate
  modified_base 22: mod_base = OTHER; note = 2'-O-methylguanosine-3'-phosphate
  modified_base 23: mod_base = OTHER; note = 2'-O-methylguanosine
tttctttcctgtggtggtggtgg

SEQ ID NO: 4951 - RNA, 23 nt, synthetic construct
  source 1..23: mol_type = other RNA
  modified_base 1: mod_base = OTHER; note = 2'-O-methyluridine-3'-phosphate 5'phosphate
  modified_base 2: mod_base = OTHER; note = 2'-deoxy-2'-fluorocytidine-3'-phosphate
  modified_base 3: mod_base = OTHER; note = 2'-O-methyluridine-3'-phosphate
  modified_base 4: mod_base = OTHER; note = 2'-O-methyluridine-3'-phosphate
  modified_base 5: mod_base = OTHER; note = 2'-O-methylcytidine-3'-phosphate
  modified_base 6: mod_base = OTHER; note = 2'-deoxy-2'-fluorouridine-3'-phosphate
  modified_base 7: mod_base = OTHER; note = 2'-O-methyluridine-3'-phosphate
  modified_base 8: mod_base = OTHER; note = 2'-O-methyluridine-3'-phosphate
  modified_base 9: mod_base = OTHER; note = 2'-O-methylcytidine-3'-phosphate
  modified_base 10: mod_base = OTHER; note = 2'-O-methylcytidine-3'-phosphate
  modified_base 11: mod_base = OTHER; note = 2'-O-methyluridine-3'-phosphate
  modified_base 12: mod_base = OTHER; note = 2'-O-methylguanosine-3'-phosphate
  modified_base 13: mod_base = OTHER; note = 2'-O-methyluridine-3'-phosphate
  modified_base 14: mod_base = OTHER; note = 2'-deoxy-2'-fluoroguanosine-3'-phosphate
  modified_base 15: mod_base = OTHER; note = 2'-O-methylguanosine-3'-phosphate
  modified_base 16: mod_base = OTHER; note = 2'-deoxy-2'-fluorouridine-3'-phosphate
  modified_base 17: mod_base = OTHER; note = 2'-O-methylguanosine-3'-phosphate
  modified_base 18: mod_base = OTHER; note = 2'-O-methylguanosine-3'-phosphate
  modified_base 19: mod_base = OTHER; note = 2'-O-methyluridine-3'-phosphate
  modified_base 20: mod_base = OTHER; note = 2'-O-methylguanosine-3'-phosphate
  modified_base 21: mod_base = OTHER; note = 2'-O-methylguanosine-3'-phosphate
  modified_base 22: mod_base = OTHER; note = 2'-O-methyluridine-3'-phosphate
  modified_base 23: mod_base = OTHER; note = 2'-O-methylguanosine
tcttctttcctgtggtggtggtg

SEQ ID NO: 4952 - RNA, 23 nt, synthetic construct
  source 1..23: mol_type = other RNA
  modified_base 1: mod_base = OTHER; note = 2'-O-methyluridine-3'-phosphate 5'phosphate
  modified_base 2: mod_base = OTHER; note = 2'-deoxy-2'-fluoroadenosine-3'-phosphate
  modified_base 3: mod_base = OTHER; note = 2'-O-methylcytidine-3'-phosphate
  modified_base 4: mod_base = OTHER; note = 2'-O-methyluridine-3'-phosphate
  modified_base 5: mod_base = OTHER; note = 2'-O-methyluridine-3'-phosphate
  modified_base 6: mod_base = OTHER; note = 2'-deoxy-2'-fluorocytidine-3'-phosphate
  modified_base 7: mod_base = OTHER; note = 2'-O-methyluridine-3'-phosphate
  modified_base 8: mod_base = OTHER; note = 2'-O-methyluridine-3'-phosphate
  modified_base 9: mod_base = OTHER; note = 2'-O-methyluridine-3'-phosphate
  modified_base 10: mod_base = OTHER; note = 2'-O-methylcytidine-3'-phosphate
  modified_base 11: mod_base = OTHER; note = 2'-O-methylcytidine-3'-phosphate
  modified_base 12: mod_base = OTHER; note = 2'-O-methyluridine-3'-phosphate
  modified_base 13: mod_base = OTHER; note = 2'-O-methylguanosine-3'-phosphate
  modified_base 14: mod_base = OTHER; note = 2'-deoxy-2'-fluorouridine-3'-phosphate
  modified_base 15: mod_base = OTHER; note = 2'-O-methylguanosine-3'-phosphate
  modified_base 16: mod_base = OTHER; note = 2'-deoxy-2'-fluoroguanosine-3'-phosphate
  modified_base 17: mod_base = OTHER; note = 2'-O-methyluridine-3'-phosphate
  modified_base 18: mod_base = OTHER; note = 2'-O-methylguanosine-3'-phosphate
  modified_base 19: mod_base = OTHER; note = 2'-O-methylguanosine-3'-phosphate
  modified_base 20: mod_base = OTHER; note = 2'-O-methyluridine-3'-phosphate
  modified_base 21: mod_base = OTHER; note = 2'-O-methylguanosine-3'-phosphate
  modified_base 22: mod_base = OTHER; note = 2'-O-methylguanosine-3'-phosphate
  modified_base 23: mod_base = OTHER; note = 2'-O-methyluridine
tacttctttcctgtggtggtggt

SEQ ID NO: 4953 - RNA, 23 nt, synthetic construct
  source 1..23: mol_type = other RNA
  modified_base 1: mod_base = OTHER; note = 2'-O-methyluridine-3'-phosphate 5'phosphate
  modified_base 2: mod_base = OTHER; note = 2'-deoxy-2'-fluoroadenosine-3'-phosphate
  modified_base 3: mod_base = OTHER; note = 2'-O-methylcytidine-3'-phosphate
  modified_base 4: mod_base = OTHER; note = 2'-O-methyladenosine-3'-phosphate
  modified_base 5: mod_base = OTHER; note = 2'-O-methylcytidine-3'-phosphate
  modified_base 6: mod_base = OTHER; note = 2'-deoxy-2'-fluorouridine-3'-phosphate
  modified_base 7: mod_base = OTHER; note = 2'-O-methyluridine-3'-phosphate
  modified_base 8: mod_base = OTHER; note = 2'-O-methylcytidine-3'-phosphate
  modified_base 9: mod_base = OTHER; note = 2'-O-methyluridine-3'-phosphate
  modified_base 10: mod_base = OTHER; note = 2'-O-methyluridine-3'-phosphate
  modified_base 11: mod_base = OTHER; note = 2'-O-methyluridine-3'-phosphate
  modified_base 12: mod_base = OTHER; note = 2'-O-methylcytidine-3'-phosphate
  modified_base 13: mod_base = OTHER; note = 2'-O-methylcytidine-3'-phosphate
  modified_base 14: mod_base = OTHER; note = 2'-deoxy-2'-fluorouridine-3'-phosphate
  modified_base 15: mod_base = OTHER; note = 2'-O-methylguanosine-3'-phosphate
  modified_base 16: mod_base = OTHER; note = 2'-deoxy-2'-fluorouridine-3'-phosphate
  modified_base 17: mod_base = OTHER; note = 2'-O-methylguanosine-3'-phosphate
  modified_base 18: mod_base = OTHER; note = 2'-O-methylguanosine-3'-phosphate
  modified_base 19: mod_base = OTHER; note = 2'-O-methyluridine-3'-phosphate
  modified_base 20: mod_base = OTHER; note = 2'-O-methylguanosine-3'-phosphate
  modified_base 21: mod_base = OTHER; note = 2'-O-methylguanosine-3'-phosphate
  modified_base 22: mod_base = OTHER; note = 2'-O-methyluridine-3'-phosphate
  modified_base 23: mod_base = OTHER; note = 2'-O-methylguanosine
tacacttctttcctgtggtggtg

SEQ ID NO: 4954 - RNA, 23 nt, synthetic construct
  source 1..23: mol_type = other RNA
  modified_base 1: mod_base = OTHER; note = 2'-O-methyluridine-3'-phosphate 5'phosphate
  modified_base 2: mod_base = OTHER; note = 2'-deoxy-2'-fluoroguanosine-3'-phosphate
  modified_base 3: mod_base = OTHER; note = 2'-O-methyladenosine-3'-phosphate
  modified_base 4: mod_base = OTHER; note = 2'-O-methylcytidine-3'-phosphate
  modified_base 5: mod_base = OTHER; note = 2'-O-methyladenosine-3'-phosphate
  modified_base 6: mod_base = OTHER; note = 2'-deoxy-2'-fluorocytidine-3'-phosphate
  modified_base 7: mod_base = OTHER; note = 2'-O-methyluridine-3'-phosphate
  modified_base 8: mod_base = OTHER; note = 2'-O-methyluridine-3'-phosphate
  modified_base 9: mod_base = OTHER; note = 2'-O-methylcytidine-3'-phosphate
  modified_base 10: mod_base = OTHER; note = 2'-O-methyluridine-3'-phosphate
  modified_base 11: mod_base = OTHER; note = 2'-O-methyluridine-3'-phosphate
  modified_base 12: mod_base = OTHER; note = 2'-O-methyluridine-3'-phosphate
  modified_base 13: mod_base = OTHER; note = 2'-O-methylcytidine-3'-phosphate
  modified_base 14: mod_base = OTHER; note = 2'-deoxy-2'-fluorocytidine-3'-phosphate
  modified_base 15: mod_base = OTHER; note = 2'-O-methyluridine-3'-phosphate
  modified_base 16: mod_base = OTHER; note = 2'-deoxy-2'-fluoroguanosine-3'-phosphate
  modified_base 17: mod_base = OTHER; note = 2'-O-methyluridine-3'-phosphate
  modified_base 18: mod_base = OTHER; note = 2'-O-methylguanosine-3'-phosphate
  modified_base 19: mod_base = OTHER; note = 2'-O-methylguanosine-3'-phosphate
  modified_base 20: mod_base = OTHER; note = 2'-O-methyluridine-3'-phosphate
  modified_base 21: mod_base = OTHER; note = 2'-O-methylguanosine-3'-phosphate
  modified_base 22: mod_base = OTHER; note = 2'-O-methylguanosine-3'-phosphate
  modified_base 23: mod_base = OTHER; note = 2'-O-methyluridine
tgacacttctttcctgtggtggt

SEQ ID NO: 4955 - RNA, 23 nt, synthetic construct
  source 1..23: mol_type = other RNA
  modified_base 1: mod_base = OTHER; note = 2'-O-methyluridine-3'-phosphate 5'phosphate
  modified_base 2: mod_base = OTHER; note = 2'-deoxy-2'-fluorouridine-3'-phosphate
  modified_base 3: mod_base = OTHER; note = 2'-O-methylguanosine-3'-phosphate
  modified_base 4: mod_base = OTHER; note = 2'-O-methyladenosine-3'-phosphate
  modified_base 5: mod_base = OTHER; note = 2'-O-methylcytidine-3'-phosphate
  modified_base 6: mod_base = OTHER; note = 2'-deoxy-2'-fluoroadenosine-3'-phosphate
  modified_base 7: mod_base = OTHER; note = 2'-O-methylcytidine-3'-phosphate
  modified_base 8: mod_base = OTHER; note = 2'-O-methyluridine-3'-phosphate
  modified_base 9: mod_base = OTHER; note = 2'-O-methyluridine-3'-phosphate
  modified_base 10: mod_base = OTHER; note = 2'-O-methylcytidine-3'-phosphate
  modified_base 11: mod_base = OTHER; note = 2'-O-methyluridine-3'-phosphate
  modified_base 12: mod_base = OTHER; note = 2'-O-methyluridine-3'-phosphate
  modified_base 13: mod_base = OTHER; note = 2'-O-methyluridine-3'-phosphate
  modified_base 14: mod_base = OTHER; note = 2'-deoxy-2'-fluorocytidine-3'-phosphate
  modified_base 15: mod_base = OTHER; note = 2'-O-methylcytidine-3'-phosphate
  modified_base 16: mod_base = OTHER; note = 2'-deoxy-2'-fluorouridine-3'-phosphate
  modified_base 17: mod_base = OTHER; note = 2'-O-methylguanosine-3'-phosphate
  modified_base 18: mod_base = OTHER; note = 2'-O-methyluridine-3'-phosphate
  modified_base 19: mod_base = OTHER; note = 2'-O-methylguanosine-3'-phosphate
  modified_base 20: mod_base = OTHER; note = 2'-O-methylguanosine-3'-phosphate
  modified_base 21: mod_base = OTHER; note = 2'-O-methyluridine-3'-phosphate
  modified_base 22: mod_base = OTHER; note = 2'-O-methylguanosine-3'-phosphate
  modified_base 23: mod_base = OTHER; note = 2'-O-methylguanosine
ttgacacttctttcctgtggtgg

SEQ ID NO: 4956 - RNA, 23 nt, synthetic construct
  source 1..23: mol_type = other RNA
  modified_base 1: mod_base = OTHER; note = 2'-O-methyluridine-3'-phosphate 5'phosphate
  modified_base 2: mod_base = OTHER; note = 2'-deoxy-2'-fluorocytidine-3'-phosphate
  modified_base 3: mod_base = OTHER; note = 2'-O-methyluridine-3'-phosphate
  modified_base 4: mod_base = OTHER; note = 2'-O-methylguanosine-3'-phosphate
  modified_base 5: mod_base = OTHER; note = 2'-O-methyladenosine-3'-phosphate
  modified_base 6: mod_base = OTHER; note = 2'-deoxy-2'-fluorocytidine-3'-phosphate
  modified_base 7: mod_base = OTHER; note = 2'-O-methyladenosine-3'-phosphate
  modified_base 8: mod_base = OTHER; note = 2'-O-methylcytidine-3'-phosphate
  modified_base 9: mod_base = OTHER; note = 2'-O-methyluridine-3'-phosphate
  modified_base 10: mod_base = OTHER; note = 2'-O-methyluridine-3'-phosphate
  modified_base 11: mod_base = OTHER; note = 2'-O-methylcytidine-3'-phosphate
  modified_base 12: mod_base = OTHER; note = 2'-O-methyluridine-3'-phosphate
  modified_base 13: mod_base = OTHER; note = 2'-O-methyluridine-3'-phosphate
  modified_base 14: mod_base = OTHER; note = 2'-deoxy-2'-fluorouridine-3'-phosphate
  modified_base 15: mod_base = OTHER; note = 2'-O-methylcytidine-3'-phosphate
  modified_base 16: mod_base = OTHER; note = 2'-deoxy-2'-fluorocytidine-3'-phosphate
  modified_base 17: mod_base = OTHER; note = 2'-O-methyluridine-3'-phosphate
  modified_base 18: mod_base = OTHER; note = 2'-O-methylguanosine-3'-phosphate
  modified_base 19: mod_base = OTHER; note = 2'-O-methyluridine-3'-phosphate
  modified_base 20: mod_base = OTHER; note = 2'-O-methylguanosine-3'-phosphate
  modified_base 21: mod_base = OTHER; note = 2'-O-methylguanosine-3'-phosphate
  modified_base 22: mod_base = OTHER; note = 2'-O-methyluridine-3'-phosphate
  modified_base 23: mod_base = OTHER; note = 2'-O-methylguanosine
tctgacacttctttcctgtggtg

SEQ ID NO: 4957 - RNA, 23 nt, synthetic construct
  source 1..23: mol_type = other RNA
  modified_base 1: mod_base = OTHER; note = 2'-O-methyluridine-3'-phosphate 5'phosphate
  modified_base 2: mod_base = OTHER; note = 2'-deoxy-2'-fluoroadenosine-3'-phosphate
  modified_base 3: mod_base = OTHER; note = 2'-O-methylcytidine-3'-phosphate
  modified_base 4: mod_base = OTHER; note = 2'-O-methyluridine-3'-phosphate
  modified_base 5: mod_base = OTHER; note = 2'-O-methylguanosine-3'-phosphate
  modified_base 6: mod_base = OTHER; note = 2'-deoxy-2'-fluoroadenosine-3'-phosphate
  modified_base 7: mod_base = OTHER; note = 2'-O-methylcytidine-3'-phosphate
  modified_base 8: mod_base = OTHER; note = 2'-O-methyladenosine-3'-phosphate
  modified_base 9: mod_base = OTHER; note = 2'-O-methylcytidine-3'-phosphate
  modified_base 10: mod_base = OTHER; note = 2'-O-methyluridine-3'-phosphate
  modified_base 11: mod_base = OTHER; note = 2'-O-methyluridine-3'-phosphate
  modified_base 12: mod_base = OTHER; note = 2'-O-methylcytidine-3'-phosphate
  modified_base 13: mod_base = OTHER; note = 2'-O-methyluridine-3'-phosphate
  modified_base 14: mod_base = OTHER; note = 2'-deoxy-2'-fluorouridine-3'-phosphate
  modified_base 15: mod_base = OTHER; note = 2'-O-methyluridine-3'-phosphate
  modified_base 16: mod_base = OTHER; note = 2'-deoxy-2'-fluorocytidine-3'-phosphate
  modified_base 17: mod_base = OTHER; note = 2'-O-methylcytidine-3'-phosphate
  modified_base 18: mod_base = OTHER; note = 2'-O-methyluridine-3'-phosphate
  modified_base 19: mod_base = OTHER; note = 2'-O-methylguanosine-3'-phosphate
  modified_base 20: mod_base = OTHER; note = 2'-O-methyluridine-3'-phosphate
  modified_base 21: mod_base = OTHER; note = 2'-O-methylguanosine-3'-phosphate
  modified_base 22: mod_base = OTHER; note = 2'-O-methylguanosine-3'-phosphate
  modified_base 23: mod_base = OTHER; note = 2'-O-methyluridine
tactgacacttctttcctgtggt

SEQ ID NO: 4958 - RNA, 23 nt, synthetic construct
  source 1..23: mol_type = other RNA
  modified_base 1: mod_base = OTHER; note = 2'-O-methyluridine-3'-phosphate 5'phosphate
  modified_base 2: mod_base = OTHER; note = 2'-deoxy-2'-fluoroguanosine-3'-phosphate
  modified_base 3: mod_base = OTHER; note = 2'-O-methyladenosine-3'-phosphate
  modified_base 4: mod_base = OTHER; note = 2'-O-methylcytidine-3'-phosphate
  modified_base 5: mod_base = OTHER; note = 2'-O-methyluridine-3'-phosphate
  modified_base 6: mod_base = OTHER; note = 2'-deoxy-2'-fluoroguanosine-3'-phosphate
  modified_base 7: mod_base = OTHER; note = 2'-O-methyladenosine-3'-phosphate
  modified_base 8: mod_base = OTHER; note = 2'-O-methylcytidine-3'-phosphate
  modified_base 9: mod_base = OTHER; note = 2'-O-methyladenosine-3'-phosphate
  modified_base 10: mod_base = OTHER; note = 2'-O-methylcytidine-3'-phosphate
  modified_base 11: mod_base = OTHER; note = 2'-O-methyluridine-3'-phosphate
  modified_base 12: mod_base = OTHER; note = 2'-O-methyluridine-3'-phosphate
  modified_base 13: mod_base = OTHER; note = 2'-O-methylcytidine-3'-phosphate
  modified_base 14: mod_base = OTHER; note = 2'-deoxy-2'-fluorouridine-3'-phosphate
  modified_base 15: mod_base = OTHER; note = 2'-O-methyluridine-3'-phosphate
  modified_base 16: mod_base = OTHER; note = 2'-deoxy-2'-fluorouridine-3'-phosphate
  modified_base 17: mod_base = OTHER; note = 2'-O-methylcytidine-3'-phosphate
  modified_base 18: mod_base = OTHER; note = 2'-O-methylcytidine-3'-phosphate
  modified_base 19: mod_base = OTHER; note = 2'-O-methyluridine-3'-phosphate
  modified_base 20: mod_base = OTHER; note = 2'-O-methylguanosine-3'-phosphate
  modified_base 21: mod_base = OTHER; note = 2'-O-methyluridine-3'-phosphate
  modified_base 22: mod_base = OTHER; note = 2'-O-methylguanosine-3'-phosphate
  modified_base 23: mod_base = OTHER; note = 2'-O-methylguanosine
tgactgacacttctttcctgtgg

SEQ ID NO: 4959 - RNA, 23 nt, synthetic construct
  source 1..23: mol_type = other RNA
  modified_base 1: mod_base = OTHER; note = 2'-O-methyluridine-3'-phosphate 5'phosphate
  modified_base 2: mod_base = OTHER; note = 2'-deoxy-2'-fluoroadenosine-3'-phosphate
  modified_base 3: mod_base = OTHER; note = 2'-O-methylguanosine-3'-phosphate
  modified_base 4: mod_base = OTHER; note = 2'-O-methyladenosine-3'-phosphate
  modified_base 5: mod_base = OTHER; note = 2'-O-methylcytidine-3'-phosphate
  modified_base 6: mod_base = OTHER; note = 2'-deoxy-2'-fluorouridine-3'-phosphate
  modified_base 7: mod_base = OTHER; note = 2'-O-methylguanosine-3'-phosphate
  modified_base 8: mod_base = OTHER; note = 2'-O-methyladenosine-3'-phosphate
  modified_base 9: mod_base = OTHER; note = 2'-O-methylcytidine-3'-phosphate
  modified_base 10: mod_base = OTHER; note = 2'-O-methyladenosine-3'-phosphate
  modified_base 11: mod_base = OTHER; note = 2'-O-methylcytidine-3'-phosphate
  modified_base 12: mod_base = OTHER; note = 2'-O-methyluridine-3'-phosphate
  modified_base 13: mod_base = OTHER; note = 2'-O-methyluridine-3'-phosphate
  modified_base 14: mod_base = OTHER; note = 2'-deoxy-2'-fluorocytidine-3'-phosphate
  modified_base 15: mod_base = OTHER; note = 2'-O-methyluridine-3'-phosphate
  modified_base 16: mod_base = OTHER; note = 2'-deoxy-2'-fluorouridine-3'-phosphate
  modified_base 17: mod_base = OTHER; note = 2'-O-methyluridine-3'-phosphate
  modified_base 18: mod_base = OTHER; note = 2'-O-methylcytidine-3'-phosphate
  modified_base 19: mod_base = OTHER; note = 2'-O-methylcytidine-3'-phosphate
  modified_base 20: mod_base = OTHER; note = 2'-O-methyluridine-3'-phosphate
  modified_base 21: mod_base = OTHER; note = 2'-O-methylguanosine-3'-phosphate
  modified_base 22: mod_base = OTHER; note = 2'-O-methyluridine-3'-phosphate
  modified_base 23: mod_base = OTHER; note = 2'-O-methylguanosine
tagactgacacttctttcctgtg

SEQ ID NO: 4960 - RNA, 23 nt, synthetic construct
  source 1..23: mol_type = other RNA
  modified_base 1: mod_base = OTHER; note = 2'-O-methyluridine-3'-phosphate 5'phosphate
  modified_base 2: mod_base = OTHER; note = 2'-deoxy-2'-fluoroadenosine-3'-phosphate
  modified_base 3: mod_base = OTHER; note = 2'-O-methyladenosine-3'-phosphate
  modified_base 4: mod_base = OTHER; note = 2'-O-methylguanosine-3'-phosphate
  modified_base 5: mod_base = OTHER; note = 2'-O-methyladenosine-3'-phosphate
  modified_base 6: mod_base = OTHER; note = 2'-deoxy-2'-fluorocytidine-3'-phosphate
  modified_base 7: mod_base = OTHER; note = 2'-O-methyluridine-3'-phosphate
  modified_base 8: mod_base = OTHER; note = 2'-O-methylguanosine-3'-phosphate
  modified_base 9: mod_base = OTHER; note = 2'-O-methyladenosine-3'-phosphate
  modified_base 10: mod_base = OTHER; note = 2'-O-methylcytidine-3'-phosphate
  modified_base 11: mod_base = OTHER; note = 2'-O-methyladenosine-3'-phosphate
  modified_base 12: mod_base = OTHER; note = 2'-O-methylcytidine-3'-phosphate
  modified_base 13: mod_base = OTHER; note = 2'-O-methyluridine-3'-phosphate
  modified_base 14: mod_base = OTHER; note = 2'-deoxy-2'-fluorouridine-3'-phosphate
  modified_base 15: mod_base = OTHER; note = 2'-O-methylcytidine-3'-phosphate
  modified_base 16: mod_base = OTHER; note = 2'-deoxy-2'-fluorouridine-3'-phosphate
  modified_base 17: mod_base = OTHER; note = 2'-O-methyluridine-3'-phosphate
  modified_base 18: mod_base = OTHER; note = 2'-O-methyluridine-3'-phosphate
  modified_base 19: mod_base = OTHER; note = 2'-O-methylcytidine-3'-phosphate
  modified_base 20: mod_base = OTHER; note = 2'-O-methylcytidine-3'-phosphate
  modified_base 21: mod_base = OTHER; note = 2'-O-methyluridine-3'-phosphate
  modified_base 22: mod_base = OTHER; note = 2'-O-methylguanosine-3'-phosphate
  modified_base 23: mod_base = OTHER; note = 2'-O-methyluridine
taagactgacacttctttcctgt

SEQ ID NO: 4961 - RNA, 23 nt, synthetic construct
  source 1..23: mol_type = other RNA
  modified_base 1: mod_base = OTHER; note = 2'-O-methyluridine-3'-phosphate 5'phosphate
  modified_base 2: mod_base = OTHER; note = 2'-deoxy-2'-fluorocytidine-3'-phosphate
  modified_base 3: mod_base = OTHER; note = 2'-O-methyladenosine-3'-phosphate
  modified_base 4: mod_base = OTHER; note = 2'-O-methyladenosine-3'-phosphate
  modified_base 5: mod_base = OTHER; note = 2'-O-methylguanosine-3'-phosphate
  modified_base 6: mod_base = OTHER; note = 2'-deoxy-2'-fluoroadenosine-3'-phosphate
  modified_base 7: mod_base = OTHER; note = 2'-O-methylcytidine-3'-phosphate
  modified_base 8: mod_base = OTHER; note = 2'-O-methyluridine-3'-phosphate
  modified_base 9: mod_base = OTHER; note = 2'-O-methylguanosine-3'-phosphate
  modified_base 10: mod_base = OTHER; note = 2'-O-methyladenosine-3'-phosphate
  modified_base 11: mod_base = OTHER; note = 2'-O-methylcytidine-3'-phosphate
  modified_base 12: mod_base = OTHER; note = 2'-O-methyladenosine-3'-phosphate
  modified_base 13: mod_base = OTHER; note = 2'-O-methylcytidine-3'-phosphate
  modified_base 14: mod_base = OTHER; note = 2'-deoxy-2'-fluorouridine-3'-phosphate
  modified_base 15: mod_base = OTHER; note = 2'-O-methyluridine-3'-phosphate
  modified_base 16: mod_base = OTHER; note = 2'-deoxy-2'-fluorocytidine-3'-phosphate
  modified_base 17: mod_base = OTHER; note = 2'-O-methyluridine-3'-phosphate
  modified_base 18: mod_base = OTHER; note = 2'-O-methyluridine-3'-phosphate
  modified_base 19: mod_base = OTHER; note = 2'-O-methyluridine-3'-phosphate
  modified_base 20: mod_base = OTHER; note = 2'-O-methylcytidine-3'-phosphate
  modified_base 21: mod_base = OTHER; note = 2'-O-methylcytidine-3'-phosphate
  modified_base 22: mod_base = OTHER; note = 2'-O-methyluridine-3'-phosphate
  modified_base 23: mod_base = OTHER; note = 2'-O-methylguanosine
tcaagactgacacttctttcctg

SEQ ID NO: 4962 - RNA, 23 nt, synthetic construct
  source 1..23: mol_type = other RNA
  modified_base 1: mod_base = OTHER; note = 2'-O-methyluridine-3'-phosphate 5'phosphate
  modified_base 2: mod_base = OTHER; note = 2'-deoxy-2'-fluorocytidine-3'-phosphate
  modified_base 3: mod_base = OTHER; note = 2'-O-methylcytidine-3'-phosphate
  modified_base 4: mod_base = OTHER; note = 2'-O-methyladenosine-3'-phosphate
  modified_base 5: mod_base = OTHER; note = 2'-O-methyladenosine-3'-phosphate
  modified_base 6: mod_base = OTHER; note = 2'-deoxy-2'-fluoroguanosine-3'-phosphate
  modified_base 7: mod_base = OTHER; note = 2'-O-methyladenosine-3'-phosphate
  modified_base 8: mod_base = OTHER; note = 2'-O-methylcytidine-3'-phosphate
  modified_base 9: mod_base = OTHER; note = 2'-O-methyluridine-3'-phosphate
  modified_base 10: mod_base = OTHER; note = 2'-O-methylguanosine-3'-phosphate
  modified_base 11: mod_base = OTHER; note = 2'-O-methyladenosine-3'-phosphate
  modified_base 12: mod_base = OTHER; note = 2'-O-methylcytidine-3'-phosphate
  modified_base 13: mod_base = OTHER; note = 2'-O-methyladenosine-3'-phosphate
  modified_base 14: mod_base = OTHER; note = 2'-deoxy-2'-fluorocytidine-3'-phosphate
  modified_base 15: mod_base = OTHER; note = 2'-O-methyluridine-3'-phosphate
  modified_base 16: mod_base = OTHER; note = 2'-deoxy-2'-fluorouridine-3'-phosphate
  modified_base 17: mod_base = OTHER; note = 2'-O-methylcytidine-3'-phosphate
  modified_base 18: mod_base = OTHER; note = 2'-O-methyluridine-3'-phosphate
  modified_base 19: mod_base = OTHER; note = 2'-O-methyluridine-3'-phosphate
  modified_base 20: mod_base = OTHER; note = 2'-O-methyluridine-3'-phosphate
  modified_base 21: mod_base = OTHER; note = 2'-O-methylcytidine-3'-phosphate
  modified_base 22: mod_base = OTHER; note = 2'-O-methylcytidine-3'-phosphate
  modified_base 23: mod_base = OTHER; note = 2'-O-methyluridine
tccaagactgacacttctttcct

SEQ ID NO: 4963 - RNA, 23 nt, synthetic construct
  source 1..23: mol_type = other RNA
  modified_base 1: mod_base = OTHER; note = 2'-O-methyluridine-3'-phosphate 5'phosphate
  modified_base 2: mod_base = OTHER; note = 2'-deoxy-2'-fluoroadenosine-3'-phosphate
  modified_base 3: mod_base = OTHER; note = 2'-O-methylcytidine-3'-phosphate
  modified_base 4: mod_base = OTHER; note = 2'-O-methylcytidine-3'-phosphate
  modified_base 5: mod_base = OTHER; note = 2'-O-methyladenosine-3'-phosphate
  modified_base 6: mod_base = OTHER; note = 2'-deoxy-2'-fluoroadenosine-3'-phosphate
  modified_base 7: mod_base = OTHER; note = 2'-O-methylguanosine-3'-phosphate
  modified_base 8: mod_base = OTHER; note = 2'-O-methyladenosine-3'-phosphate
  modified_base 9: mod_base = OTHER; note = 2'-O-methylcytidine-3'-phosphate
  modified_base 10: mod_base = OTHER; note = 2'-O-methyluridine-3'-phosphate
  modified_base 11: mod_base = OTHER; note = 2'-O-methylguanosine-3'-phosphate
  modified_base 12: mod_base = OTHER; note = 2'-O-methyladenosine-3'-phosphate
  modified_base 13: mod_base = OTHER; note = 2'-O-methylcytidine-3'-phosphate
  modified_base 14: mod_base = OTHER; note = 2'-deoxy-2'-fluoroadenosine-3'-phosphate
  modified_base 15: mod_base = OTHER; note = 2'-O-methylcytidine-3'-phosphate
  modified_base 16: mod_base = OTHER; note = 2'-deoxy-2'-fluorouridine-3'-phosphate
  modified_base 17: mod_base = OTHER; note = 2'-O-methyluridine-3'-phosphate
  modified_base 18: mod_base = OTHER; note = 2'-O-methylcytidine-3'-phosphate
  modified_base 19: mod_base = OTHER; note = 2'-O-methyluridine-3'-phosphate
  modified_base 20: mod_base = OTHER; note = 2'-O-methyluridine-3'-phosphate
  modified_base 21: mod_base = OTHER; note = 2'-O-methyluridine-3'-phosphate
  modified_base 22: mod_base = OTHER; note = 2'-O-methylcytidine-3'-phosphate
  modified_base 23: mod_base = OTHER; note = 2'-O-methylcytidine
taccaagactgacacttctttcc

SEQ ID NO: 4964 - RNA, 23 nt, synthetic construct
  source 1..23: mol_type = other RNA
  modified_base 1: mod_base = OTHER; note = 2'-O-methyluridine-3'-phosphate 5'phosphate
  modified_base 2: mod_base = OTHER; note = 2'-deoxy-2'-fluorouridine-3'-phosphate
  modified_base 3: mod_base = OTHER; note = 2'-O-methylguanosine-3'-phosphate
  modified_base 4: mod_base = OTHER; note = 2'-O-methyladenosine-3'-phosphate
  modified_base 5: mod_base = OTHER; note = 2'-O-methylcytidine-3'-phosphate
  modified_base 6: mod_base = OTHER; note = 2'-deoxy-2'-fluorocytidine-3'-phosphate
  modified_base 7: mod_base = OTHER; note = 2'-O-methyladenosine-3'-phosphate
  modified_base 8: mod_base = OTHER; note = 2'-O-methyladenosine-3'-phosphate
  modified_base 9: mod_base = OTHER; note = 2'-O-methylguanosine-3'-phosphate
  modified_base 10: mod_base = OTHER; note = 2'-O-methyladenosine-3'-phosphate
  modified_base 11: mod_base = OTHER; note = 2'-O-methylcytidine-3'-phosphate
  modified_base 12: mod_base = OTHER; note = 2'-O-methyluridine-3'-phosphate
  modified_base 13: mod_base = OTHER; note = 2'-O-methylguanosine-3'-phosphate
  modified_base 14: mod_base = OTHER; note = 2'-deoxy-2'-fluoroadenosine-3'-phosphate
  modified_base 15: mod_base = OTHER; note = 2'-O-methylcytidine-3'-phosphate
  modified_base 16: mod_base = OTHER; note = 2'-deoxy-2'-fluoroadenosine-3'-phosphate
  modified_base 17: mod_base = OTHER; note = 2'-O-methylcytidine-3'-phosphate
  modified_base 18: mod_base = OTHER; note = 2'-O-methyluridine-3'-phosphate
  modified_base 19: mod_base = OTHER; note = 2'-O-methyluridine-3'-phosphate
  modified_base 20: mod_base = OTHER; note = 2'-O-methylcytidine-3'-phosphate
  modified_base 21: mod_base = OTHER; note = 2'-O-methyluridine-3'-phosphate
  modified_base 22: mod_base = OTHER; note = 2'-O-methyluridine-3'-phosphate
  modified_base 23: mod_base = OTHER; note = 2'-O-methyluridine
ttgaccaagactgacacttcttt

SEQ ID NO: 4965 - RNA, 23 nt, synthetic construct
  source 1..23: mol_type = other RNA
  modified_base 1: mod_base = OTHER; note = 2'-O-methyluridine-3'-phosphate 5'phosphate
  modified_base 2: mod_base = OTHER; note = 2'-deoxy-2'-fluoroadenosine-3'-phosphate
  modified_base 3: mod_base = OTHER; note = 2'-O-methyluridine-3'-phosphate
  modified_base 4: mod_base = OTHER; note = 2'-O-methylguanosine-3'-phosphate
  modified_base 5: mod_base = OTHER; note = 2'-O-methyladenosine-3'-phosphate
  modified_base 6: mod_base = OTHER; note = 2'-deoxy-2'-fluorocytidine-3'-phosphate
  modified_base 7: mod_base = OTHER; note = 2'-O-methylcytidine-3'-phosphate
  modified_base 8: mod_base = OTHER; note = 2'-O-methyladenosine-3'-phosphate
  modified_base 9: mod_base = OTHER; note = 2'-O-methyladenosine-3'-phosphate
  modified_base 10: mod_base = OTHER; note = 2'-O-methylguanosine-3'-phosphate
  modified_base 11: mod_base = OTHER; note = 2'-O-methyladenosine-3'-phosphate
  modified_base 12: mod_base = OTHER; note = 2'-O-methylcytidine-3'-phosphate
  modified_base 13: mod_base = OTHER; note = 2'-O-methyluridine-3'-phosphate
  modified_base 14: mod_base = OTHER; note = 2'-deoxy-2'-fluoroguanosine-3'-phosphate
  modified_base 15: mod_base = OTHER; note = 2'-O-methyladenosine-3'-phosphate
  modified_base 16: mod_base = OTHER; note = 2'-deoxy-2'-fluorocytidine-3'-phosphate
  modified_base 17: mod_base = OTHER; note = 2'-O-methyladenosine-3'-phosphate
  modified_base 18: mod_base = OTHER; note = 2'-O-methylcytidine-3'-phosphate
  modified_base 19: mod_base = OTHER; note = 2'-O-methyluridine-3'-phosphate
  modified_base 20: mod_base = OTHER; note = 2'-O-methyluridine-3'-phosphate
  modified_base 21: mod_base = OTHER; note = 2'-O-methylcytidine-3'-phosphate
  modified_base 22: mod_base = OTHER; note = 2'-O-methyluridine-3'-phosphate
  modified_base 23: mod_base = OTHER; note = 2'-O-methyluridine
tatgaccaagactgacacttctt

SEQ ID NO: 4966 - RNA, 23 nt, synthetic construct
  source 1..23: mol_type = other RNA
  modified_base 1: mod_base = OTHER; note = 2'-O-methyluridine-3'-phosphate 5'phosphate
  modified_base 2: mod_base = OTHER; note = 2'-deoxy-2'-fluoroguanosine-3'-phosphate
  modified_base 3: mod_base = OTHER; note = 2'-O-methyladenosine-3'-phosphate
  modified_base 4: mod_base = OTHER; note = 2'-O-methyluridine-3'-phosphate
  modified_base 5: mod_base = OTHER; note = 2'-O-methylguanosine-3'-phosphate
  modified_base 6: mod_base = OTHER; note = 2'-deoxy-2'-fluoroadenosine-3'-phosphate
  modified_base 7: mod_base = OTHER; note = 2'-O-methylcytidine-3'-phosphate
  modified_base 8: mod_base = OTHER; note = 2'-O-methylcytidine-3'-phosphate
  modified_base 9: mod_base = OTHER; note = 2'-O-methyladenosine-3'-phosphate
  modified_base 10: mod_base = OTHER; note = 2'-O-methyladenosine-3'-phosphate
  modified_base 11: mod_base = OTHER; note = 2'-O-methylguanosine-3'-phosphate
  modified_base 12: mod_base = OTHER; note = 2'-O-methyladenosine-3'-phosphate
  modified_base 13: mod_base = OTHER; note = 2'-O-methylcytidine-3'-phosphate
  modified_base 14: mod_base = OTHER; note = 2'-deoxy-2'-fluorouridine-3'-phosphate
  modified_base 15: mod_base = OTHER; note = 2'-O-methylguanosine-3'-phosphate
  modified_base 16: mod_base = OTHER; note = 2'-deoxy-2'-fluoroadenosine-3'-phosphate
  modified_base 17: mod_base = OTHER; note = 2'-O-methylcytidine-3'-phosphate
  modified_base 18: mod_base = OTHER; note = 2'-O-methyladenosine-3'-phosphate
  modified_base 19: mod_base = OTHER; note = 2'-O-methylcytidine-3'-phosphate
  modified_base 20: mod_base = OTHER; note = 2'-O-methyluridine-3'-phosphate
  modified_base 21: mod_base = OTHER; note = 2'-O-methyluridine-3'-phosphate
  modified_base 22: mod_base = OTHER; note = 2'-O-methylcytidine-3'-phosphate
  modified_base 23: mod_base = OTHER; note = 2'-O-methyluridine
tgatgaccaagactgacacttct

SEQ ID NO: 4967 - RNA, 23 nt, synthetic construct
  source 1..23: mol_type = other RNA
  modified_base 1: mod_base = OTHER; note = 2'-O-methyluridine-3'-phosphate 5'phosphate
  modified_base 2: mod_base = OTHER; note = 2'-deoxy-2'-fluoroadenosine-3'-phosphate
  modified_base 3: mod_base = OTHER; note = 2'-O-methylguanosine-3'-phosphate
  modified_base 4: mod_base = OTHER; note = 2'-O-methyladenosine-3'-phosphate
  modified_base 5: mod_base = OTHER; note = 2'-O-methyluridine-3'-phosphate
  modified_base 6: mod_base = OTHER; note = 2'-deoxy-2'-fluoroguanosine-3'-phosphate
  modified_base 7: mod_base = OTHER; note = 2'-O-methyladenosine-3'-phosphate
  modified_base 8: mod_base = OTHER; note = 2'-O-methylcytidine-3'-phosphate
  modified_base 9: mod_base = OTHER; note = 2'-O-methylcytidine-3'-phosphate
  modified_base 10: mod_base = OTHER; note = 2'-O-methyladenosine-3'-phosphate
  modified_base 11: mod_base = OTHER; note = 2'-O-methyladenosine-3'-phosphate
  modified_base 12: mod_base = OTHER; note = 2'-O-methylguanosine-3'-phosphate
  modified_base 13: mod_base = OTHER; note = 2'-O-methyladenosine-3'-phosphate
  modified_base 14: mod_base = OTHER; note = 2'-deoxy-2'-fluorocytidine-3'-phosphate
  modified_base 15: mod_base = OTHER; note = 2'-O-methyluridine-3'-phosphate
  modified_base 16: mod_base = OTHER; note = 2'-deoxy-2'-fluoroguanosine-3'-phosphate
  modified_base 17: mod_base = OTHER; note = 2'-O-methyladenosine-3'-phosphate
  modified_base 18: mod_base = OTHER; note = 2'-O-methylcytidine-3'-phosphate
  modified_base 19: mod_base = OTHER; note = 2'-O-methyladenosine-3'-phosphate
  modified_base 20: mod_base = OTHER; note = 2'-O-methylcytidine-3'-phosphate
  modified_base 21: mod_base = OTHER; note = 2'-O-methyluridine-3'-phosphate
  modified_base 22: mod_base = OTHER; note = 2'-O-methyluridine-3'-phosphate
  modified_base 23: mod_base = OTHER; note = 2'-O-methylcytidine
tagatgaccaagactgacacttc

SEQ ID NO: 4968 - RNA, 23 nt, synthetic construct
  source 1..23: mol_type = other RNA
  modified_base 1: mod_base = OTHER; note = 2'-O-methyluridine-3'-phosphate 5'phosphate
  modified_base 2: mod_base = OTHER; note = 2'-deoxy-2'-fluorouridine-3'-phosphate
  modified_base 3: mod_base = OTHER; note = 2'-O-methyladenosine-3'-phosphate
  modified_base 4: mod_base = OTHER; note = 2'-O-methylguanosine-3'-phosphate
  modified_base 5: mod_base = OTHER; note = 2'-O-methyladenosine-3'-phosphate
  modified_base 6: mod_base = OTHER; note = 2'-deoxy-2'-fluorouridine-3'-phosphate
  modified_base 7: mod_base = OTHER; note = 2'-O-methylguanosine-3'-phosphate
  modified_base 8: mod_base = OTHER; note = 2'-O-methyladenosine-3'-phosphate
  modified_base 9: mod_base = OTHER; note = 2'-O-methylcytidine-3'-phosphate
  modified_base 10: mod_base = OTHER; note = 2'-O-methylcytidine-3'-phosphate
  modified_base 11: mod_base = OTHER; note = 2'-O-methyladenosine-3'-phosphate
  modified_base 12: mod_base = OTHER; note = 2'-O-methyladenosine-3'-phosphate
  modified_base 13: mod_base = OTHER; note = 2'-O-methylguanosine-3'-phosphate
  modified_base 14: mod_base = OTHER; note = 2'-deoxy-2'-fluoroadenosine-3'-phosphate
  modified_base 15: mod_base = OTHER; note = 2'-O-methylcytidine-3'-phosphate
  modified_base 16: mod_base = OTHER; note = 2'-deoxy-2'-fluorouridine-3'-phosphate
  modified_base 17: mod_base = OTHER; note = 2'-O-methylguanosine-3'-phosphate
  modified_base 18: mod_base = OTHER; note = 2'-O-methyladenosine-3'-phosphate
  modified_base 19: mod_base = OTHER; note = 2'-O-methylcytidine-3'-phosphate
  modified_base 20: mod_base = OTHER; note = 2'-O-methyladenosine-3'-phosphate
  modified_base 21: mod_base = OTHER; note = 2'-O-methylcytidine-3'-phosphate
  modified_base 22: mod_base = OTHER; note = 2'-O-methyluridine-3'-phosphate
  modified_base 23: mod_base = OTHER; note = 2'-O-methyluridine
ttagatgaccaagactgacactt

SEQ ID NO: 4969 - RNA, 23 nt, synthetic construct
  source 1..23: mol_type = other RNA
  modified_base 1: mod_base = OTHER; note = 2'-O-methyluridine-3'-phosphate 5'phosphate
  modified_base 2: mod_base = OTHER; note = 2'-deoxy-2'-fluoroadenosine-3'-phosphate
  modified_base 3: mod_base = OTHER; note = 2'-O-methyluridine-3'-phosphate
  modified_base 4: mod_base = OTHER; note = 2'-O-methyladenosine-3'-phosphate
  modified_base 5: mod_base = OTHER; note = 2'-O-methylguanosine-3'-phosphate
  modified_base 6: mod_base = OTHER; note = 2'-deoxy-2'-fluoroadenosine-3'-phosphate
  modified_base 7: mod_base = OTHER; note = 2'-O-methyluridine-3'-phosphate
  modified_base 8: mod_base = OTHER; note = 2'-O-methylguanosine-3'-phosphate
  modified_base 9: mod_base = OTHER; note = 2'-O-methyladenosine-3'-phosphate
  modified_base 10: mod_base = OTHER; note = 2'-O-methylcytidine-3'-phosphate
  modified_base 11: mod_base = OTHER; note = 2'-O-methylcytidine-3'-phosphate
  modified_base 12: mod_base = OTHER; note = 2'-O-methyladenosine-3'-phosphate
  modified_base 13: mod_base = OTHER; note = 2'-O-methyladenosine-3'-phosphate
  modified_base 14: mod_base = OTHER; note = 2'-deoxy-2'-fluoroguanosine-3'-phosphate
  modified_base 15: mod_base = OTHER; note = 2'-O-methyladenosine-3'-phosphate
  modified_base 16: mod_base = OTHER; note = 2'-deoxy-2'-fluorocytidine-3'-phosphate
  modified_base 17: mod_base = OTHER; note = 2'-O-methyluridine-3'-phosphate
  modified_base 18: mod_base = OTHER; note = 2'-O-methylguanosine-3'-phosphate
  modified_base 19: mod_base = OTHER; note = 2'-O-methyladenosine-3'-phosphate
  modified_base 20: mod_base = OTHER; note = 2'-O-methylcytidine-3'-phosphate
  modified_base 21: mod_base = OTHER; note = 2'-O-methyladenosine-3'-phosphate
  modified_base 22: mod_base = OTHER; note = 2'-O-methylcytidine-3'-phosphate
  modified_base 23: mod_base = OTHER; note = 2'-O-methyluridine
tatagatgaccaagactgacact

SEQ ID NO: 4970 - RNA, 23 nt, synthetic construct
  source 1..23: mol_type = other RNA
  modified_base 1: mod_base = OTHER; note = 2'-O-methyluridine-3'-phosphate 5'phosphate
  modified_base 2: mod_base = OTHER; note = 2'-deoxy-2'-fluorocytidine-3'-phosphate
  modified_base 3: mod_base = OTHER; note = 2'-O-methyladenosine-3'-phosphate
  modified_base 4: mod_base = OTHER; note = 2'-O-methyluridine-3'-phosphate
  modified_base 5: mod_base = OTHER; note = 2'-O-methyladenosine-3'-phosphate
  modified_base 6: mod_base = OTHER; note = 2'-deoxy-2'-fluoroguanosine-3'-phosphate
  modified_base 7: mod_base = OTHER; note = 2'-O-methyladenosine-3'-phosphate
  modified_base 8: mod_base = OTHER; note = 2'-O-methyluridine-3'-phosphate
  modified_base 9: mod_base = OTHER; note = 2'-O-methylguanosine-3'-phosphate
  modified_base 10: mod_base = OTHER; note = 2'-O-methyladenosine-3'-phosphate
  modified_base 11: mod_base = OTHER; note = 2'-O-methylcytidine-3'-phosphate
  modified_base 12: mod_base = OTHER; note = 2'-O-methylcytidine-3'-phosphate
  modified_base 13: mod_base = OTHER; note = 2'-O-methyladenosine-3'-phosphate
  modified_base 14: mod_base = OTHER; note = 2'-deoxy-2'-fluoroadenosine-3'-phosphate
  modified_base 15: mod_base = OTHER; note = 2'-O-methylguanosine-3'-phosphate
  modified_base 16: mod_base = OTHER; note = 2'-deoxy-2'-fluoroadenosine-3'-phosphate
  modified_base 17: mod_base = OTHER; note = 2'-O-methylcytidine-3'-phosphate
  modified_base 18: mod_base = OTHER; note = 2'-O-methyluridine-3'-phosphate
  modified_base 19: mod_base = OTHER; note = 2'-O-methylguanosine-3'-phosphate
  modified_base 20: mod_base = OTHER; note = 2'-O-methyladenosine-3'-phosphate
  modified_base 21: mod_base = OTHER; note = 2'-O-methylcytidine-3'-phosphate
  modified_base 22: mod_base = OTHER; note = 2'-O-methyladenosine-3'-phosphate
  modified_base 23: mod_base = OTHER; note = 2'-O-methylcytidine
tcatagatgaccaagactgacac

SEQ ID NO: 4971 - RNA, 23 nt, synthetic construct
  source 1..23: mol_type = other RNA
  modified_base 1: mod_base = OTHER; note = 2'-O-methyluridine-3'-phosphate 5'phosphate
  modified_base 2: mod_base = OTHER; note = 2'-deoxy-2'-fluorouridine-3'-phosphate
  modified_base 3: mod_base = OTHER; note = 2'-O-methylcytidine-3'-phosphate
  modified_base 4: mod_base = OTHER; note = 2'-O-methyladenosine-3'-phosphate
  modified_base 5: mod_base = OTHER; note = 2'-O-methyluridine-3'-phosphate
  modified_base 6: mod_base = OTHER; note = 2'-deoxy-2'-fluoroadenosine-3'-phosphate
  modified_base 7: mod_base = OTHER; note = 2'-O-methylguanosine-3'-phosphate
  modified_base 8: mod_base = OTHER; note = 2'-O-methyladenosine-3'-phosphate
  modified_base 9: mod_base = OTHER; note = 2'-O-methyluridine-3'-phosphate
  modified_base 10: mod_base = OTHER; note = 2'-O-methylguanosine-3'-phosphate
  modified_base 11: mod_base = OTHER; note = 2'-O-methyladenosine-3'-phosphate
  modified_base 12: mod_base = OTHER; note = 2'-O-methylcytidine-3'-phosphate
  modified_base 13: mod_base = OTHER; note = 2'-O-methylcytidine-3'-phosphate
  modified_base 14: mod_base = OTHER; note = 2'-deoxy-2'-fluoroadenosine-3'-phosphate
  modified_base 15: mod_base = OTHER; note = 2'-O-methyladenosine-3'-phosphate
  modified_base 16: mod_base = OTHER; note = 2'-deoxy-2'-fluoroguanosine-3'-phosphate
  modified_base 17: mod_base = OTHER; note = 2'-O-methyladenosine-3'-phosphate
  modified_base 18: mod_base = OTHER; note = 2'-O-methylcytidine-3'-phosphate
  modified_base 19: mod_base = OTHER; note = 2'-O-methyluridine-3'-phosphate
  modified_base 20: mod_base = OTHER; note = 2'-O-methylguanosine-3'-phosphate
  modified_base 21: mod_base = OTHER; note = 2'-O-methyladenosine-3'-phosphate
  modified_base 22: mod_base = OTHER; note = 2'-O-methylcytidine-3'-phosphate
  modified_base 23: mod_base = OTHER; note = 2'-O-methyladenosine
ttcatagatgaccaagactgaca

SEQ ID NO: 4972 - RNA, 23 nt, synthetic construct
  source 1..23: mol_type = other RNA
  modified_base 1: mod_base = OTHER; note = 2'-O-methyluridine-3'-phosphate 5'phosphate
  modified_base 2: mod_base = OTHER; note = 2'-deoxy-2'-fluoroguanosine-3'-phosphate
  modified_base 3: mod_base = OTHER; note = 2'-O-methyluridine-3'-phosphate
  modified_base 4: mod_base = OTHER; note = 2'-O-methylcytidine-3'-phosphate
  modified_base 5: mod_base = OTHER; note = 2'-O-methyladenosine-3'-phosphate
  modified_base 6: mod_base = OTHER; note = 2'-deoxy-2'-fluorouridine-3'-phosphate
  modified_base 7: mod_base = OTHER; note = 2'-O-methyladenosine-3'-phosphate
  modified_base 8: mod_base = OTHER; note = 2'-O-methylguanosine-3'-phosphate
  modified_base 9: mod_base = OTHER; note = 2'-O-methyladenosine-3'-phosphate
  modified_base 10: mod_base = OTHER; note = 2'-O-methyluridine-3'-phosphate
  modified_base 11: mod_base = OTHER; note = 2'-O-methylguanosine-3'-phosphate
  modified_base 12: mod_base = OTHER; note = 2'-O-methyladenosine-3'-phosphate
  modified_base 13: mod_base = OTHER; note = 2'-O-methylcytidine-3'-phosphate
  modified_base 14: mod_base = OTHER; note = 2'-deoxy-2'-fluorocytidine-3'-phosphate
  modified_base 15: mod_base = OTHER; note = 2'-O-methyladenosine-3'-phosphate
  modified_base 16: mod_base = OTHER; note = 2'-deoxy-2'-fluoroadenosine-3'-phosphate
  modified_base 17: mod_base = OTHER; note = 2'-O-methylguanosine-3'-phosphate
  modified_base 18: mod_base = OTHER; note = 2'-O-methyladenosine-3'-phosphate
  modified_base 19: mod_base = OTHER; note = 2'-O-methylcytidine-3'-phosphate
  modified_base 20: mod_base = OTHER; note = 2'-O-methyluridine-3'-phosphate
  modified_base 21: mod_base = OTHER; note = 2'-O-methylguanosine-3'-phosphate
  modified_base 22: mod_base = OTHER; note = 2'-O-methyladenosine-3'-phosphate
  modified_base 23: mod_base = OTHER; note = 2'-O-methylcytidine
tgtcatagatgaccaagactgac

SEQ ID NO: 4973 - RNA, 23 nt, synthetic construct
  source 1..23: mol_type = other RNA
  modified_base 1: mod_base = OTHER; note = 2'-O-methyluridine-3'-phosphate 5'phosphate
  modified_base 2: mod_base = OTHER; note = 2'-deoxy-2'-fluorouridine-3'-phosphate
  modified_base 3: mod_base = OTHER; note = 2'-O-methylguanosine-3'-phosphate
  modified_base 4: mod_base = OTHER; note = 2'-O-methyluridine-3'-phosphate
  modified_base 5: mod_base = OTHER; note = 2'-O-methylcytidine-3'-phosphate
  modified_base 6: mod_base = OTHER; note = 2'-deoxy-2'-fluoroadenosine-3'-phosphate
  modified_base 7: mod_base = OTHER; note = 2'-O-methyluridine-3'-phosphate
  modified_base 8: mod_base = OTHER; note = 2'-O-methyladenosine-3'-phosphate
  modified_base 9: mod_base = OTHER; note = 2'-O-methylguanosine-3'-phosphate
  modified_base 10: mod_base = OTHER; note = 2'-O-methyladenosine-3'-phosphate
  modified_base 11: mod_base = OTHER; note = 2'-O-methyluridine-3'-phosphate
  modified_base 12: mod_base = OTHER; note = 2'-O-methylguanosine-3'-phosphate
  modified_base 13: mod_base = OTHER; note = 2'-O-methyladenosine-3'-phosphate
  modified_base 14: mod_base = OTHER; note = 2'-deoxy-2'-fluorocytidine-3'-phosphate
  modified_base 15: mod_base = OTHER; note = 2'-O-methylcytidine-3'-phosphate
  modified_base 16: mod_base = OTHER; note = 2'-deoxy-2'-fluoroadenosine-3'-phosphate
  modified_base 17: mod_base = OTHER; note = 2'-O-methyladenosine-3'-phosphate
  modified_base 18: mod_base = OTHER; note = 2'-O-methylguanosine-3'-phosphate
  modified_base 19: mod_base = OTHER; note = 2'-O-methyladenosine-3'-phosphate
  modified_base 20: mod_base = OTHER; note = 2'-O-methylcytidine-3'-phosphate
  modified_base 21: mod_base = OTHER; note = 2'-O-methyluridine-3'-phosphate
  modified_base 22: mod_base = OTHER; note = 2'-O-methylguanosine-3'-phosphate
  modified_base 23: mod_base = OTHER; note = 2'-O-methyladenosine
ttgtcatagatgaccaagactga

SEQ ID NO: 4974 - RNA, 23 nt, synthetic construct
  source 1..23: mol_type = other RNA
  modified_base 1: mod_base = OTHER; note = 2'-O-methyluridine-3'-phosphate 5'phosphate
  modified_base 2: mod_base = OTHER; note = 2'-deoxy-2'-fluorouridine-3'-phosphate
  modified_base 3: mod_base = OTHER; note = 2'-O-methyluridine-3'-phosphate
  modified_base 4: mod_base = OTHER; note = 2'-O-methyluridine-3'-phosphate
  modified_base 5: mod_base = OTHER; note = 2'-O-methyladenosine-3'-phosphate
  modified_base 6: mod_base = OTHER; note = 2'-deoxy-2'-fluorouridine-3'-phosphate
  modified_base 7: mod_base = OTHER; note = 2'-O-methylcytidine-3'-phosphate
  modified_base 8: mod_base = OTHER; note = 2'-O-methylguanosine-3'-phosphate
  modified_base 9: mod_base = OTHER; note = 2'-O-methylguanosine-3'-phosphate
  modified_base 10: mod_base = OTHER; note = 2'-O-methylcytidine-3'-phosphate
  modified_base 11: mod_base = OTHER; note = 2'-O-methyladenosine-3'-phosphate
  modified_base 12: mod_base = OTHER; note = 2'-O-methyluridine-3'-phosphate
  modified_base 13: mod_base = OTHER; note = 2'-O-methylcytidine-3'-phosphate
  modified_base 14: mod_base = OTHER; note = 2'-deoxy-2'-fluorouridine-3'-phosphate
  modified_base 15: mod_base = OTHER; note = 2'-O-methylguanosine-3'-phosphate
  modified_base 16: mod_base = OTHER; note = 2'-deoxy-2'-fluoroguanosine-3'-phosphate
  modified_base 17: mod_base = OTHER; note = 2'-O-methyladenosine-3'-phosphate
  modified_base 18: mod_base = OTHER; note = 2'-O-methyluridine-3'-phosphate
  modified_base 19: mod_base = OTHER; note = 2'-O-methyluridine-3'-phosphate
  modified_base 20: mod_base = OTHER; note = 2'-O-methylcytidine-3'-phosphate
  modified_base 21: mod_base = OTHER; note = 2'-O-methylcytidine-3'-phosphate
  modified_base 22: mod_base = OTHER; note = 2'-O-methyluridine-3'-phosphate
  modified_base 23: mod_base = OTHER; note = 2'-O-methylguanosine
ttttatcggcatctggattcctg

SEQ ID NO: 4975 - RNA, 23 nt, synthetic construct
  source 1..23: mol_type = other RNA
  modified_base 1: mod_base = OTHER; note = 2'-O-methyluridine-3'-phosphate 5'phosphate
  modified_base 2: mod_base = OTHER; note = 2'-deoxy-2'-fluorocytidine-3'-phosphate
  modified_base 3: mod_base = OTHER; note = 2'-O-methyluridine-3'-phosphate
  modified_base 4: mod_base = OTHER; note = 2'-O-methyluridine-3'-phosphate
  modified_base 5: mod_base = OTHER; note = 2'-O-methyluridine-3'-phosphate
  modified_base 6: mod_base = OTHER; note = 2'-deoxy-2'-fluoroadenosine-3'-phosphate
  modified_base 7: mod_base = OTHER; note = 2'-O-methyluridine-3'-phosphate
  modified_base 8: mod_base = OTHER; note = 2'-O-methylcytidine-3'-phosphate
  modified_base 9: mod_base = OTHER; note = 2'-O-methylguanosine-3'-phosphate
  modified_base 10: mod_base = OTHER; note = 2'-O-methylguanosine-3'-phosphate
  modified_base 11: mod_base = OTHER; note = 2'-O-methylcytidine-3'-phosphate
  modified_base 12: mod_base = OTHER; note = 2'-O-methyladenosine-3'-phosphate
  modified_base 13: mod_base = OTHER; note = 2'-O-methyluridine-3'-phosphate
  modified_base 14: mod_base = OTHER; note = 2'-deoxy-2'-fluorocytidine-3'-phosphate
  modified_base 15: mod_base = OTHER; note = 2'-O-methyluridine-3'-phosphate
  modified_base 16: mod_base = OTHER; note = 2'-deoxy-2'-fluoroguanosine-3'-phosphate
  modified_base 17: mod_base = OTHER; note = 2'-O-methylguanosine-3'-phosphate
  modified_base 18: mod_base = OTHER; note = 2'-O-methyladenosine-3'-phosphate
  modified_base 19: mod_base = OTHER; note = 2'-O-methyluridine-3'-phosphate
  modified_base 20: mod_base = OTHER; note = 2'-O-methyluridine-3'-phosphate
  modified_base 21: mod_base = OTHER; note = 2'-O-methylcytidine-3'-phosphate
  modified_base 22: mod_base = OTHER; note = 2'-O-methylcytidine-3'-phosphate
  modified_base 23: mod_base = OTHER; note = 2'-O-methyluridine
tctttatcggcatctggattcct

SEQ ID NO: 4976 - RNA, 23 nt, synthetic construct
  source 1..23: mol_type = other RNA
  modified_base 1: mod_base = OTHER; note = 2'-O-methyluridine-3'-phosphate 5'phosphate
  modified_base 2: mod_base = OTHER; note = 2'-deoxy-2'-fluorocytidine-3'-phosphate
  modified_base 3: mod_base = OTHER; note = 2'-O-methyladenosine-3'-phosphate
  modified_base 4: mod_base = OTHER; note = 2'-O-methylguanosine-3'-phosphate
  modified_base 5: mod_base = OTHER; note = 2'-O-methylguanosine-3'-phosphate
  modified_base 6: mod_base = OTHER; note = 2'-deoxy-2'-fluorouridine-3'-phosphate
  modified_base 7: mod_base = OTHER; note = 2'-O-methyluridine-3'-phosphate
  modified_base 8: mod_base = OTHER; note = 2'-O-methylguanosine-3'-phosphate
  modified_base 9: mod_base = OTHER; note = 2'-O-methylcytidine-3'-phosphate
  modified_base 10: mod_base = OTHER; note = 2'-O-methyladenosine-3'-phosphate
  modified_base 11: mod_base = OTHER; note = 2'-O-methylguanosine-3'-phosphate
  modified_base 12: mod_base = OTHER; note = 2'-O-methyluridine-3'-phosphate
  modified_base 13: mod_base = OTHER; note = 2'-O-methyladenosine-3'-phosphate
  modified_base 14: mod_base = OTHER; note = 2'-deoxy-2'-fluorocytidine-3'-phosphate
  modified_base 15: mod_base = OTHER; note = 2'-O-methyluridine-3'-phosphate
  modified_base 16: mod_base = OTHER; note = 2'-deoxy-2'-fluorocytidine-3'-phosphate
  modified_base 17: mod_base = OTHER; note = 2'-O-methylcytidine-3'-phosphate
  modified_base 18: mod_base = OTHER; note = 2'-O-methylcytidine-3'-phosphate
  modified_base 19: mod_base = OTHER; note = 2'-O-methyladenosine-3'-phosphate
  modified_base 20: mod_base = OTHER; note = 2'-O-methylcytidine-3'-phosphate
  modified_base 21: mod_base = OTHER; note = 2'-O-methylcytidine-3'-phosphate
  modified_base 22: mod_base = OTHER; note = 2'-O-methyluridine-3'-phosphate
  modified_base 23: mod_base = OTHER; note = 2'-O-methylguanosine
tcaggttgcagtactcccacctg

SEQ ID NO: 4977 - RNA, 23 nt, synthetic construct
  source 1..23: mol_type = other RNA
  modified_base 1: mod_base = OTHER; note = 2'-O-methyluridine-3'-phosphate 5'phosphate
  modified_base 2: mod_base = OTHER; note = 2'-deoxy-2'-fluorouridine-3'-phosphate
  modified_base 3: mod_base = OTHER; note = 2'-O-methylcytidine-3'-phosphate
  modified_base 4: mod_base = OTHER; note = 2'-O-methyladenosine-3'-phosphate
  modified_base 5: mod_base = OTHER; note = 2'-O-methylguanosine-3'-phosphate
  modified_base 6: mod_base = OTHER; note = 2'-deoxy-2'-fluoroguanosine-3'-phosphate
  modified_base 7: mod_base = OTHER; note = 2'-O-methyluridine-3'-phosphate
  modified_base 8: mod_base = OTHER; note = 2'-O-methyluridine-3'-phosphate
  modified_base 9: mod_base = OTHER; note = 2'-O-methylguanosine-3'-phosphate
  modified_base 10: mod_base = OTHER; note = 2'-O-methylcytidine-3'-phosphate
  modified_base 11: mod_base = OTHER; note = 2'-O-methyladenosine-3'-phosphate
  modified_base 12: mod_base = OTHER; note = 2'-O-methylguanosine-3'-phosphate
  modified_base 13: mod_base = OTHER; note = 2'-O-methyluridine-3'-phosphate
  modified_base 14: mod_base = OTHER; note = 2'-deoxy-2'-fluoroadenosine-3'-phosphate
  modified_base 15: mod_base = OTHER; note = 2'-O-methylcytidine-3'-phosphate
  modified_base 16: mod_base = OTHER; note = 2'-deoxy-2'-fluorouridine-3'-phosphate
  modified_base 17: mod_base = OTHER; note = 2'-O-methylcytidine-3'-phosphate
  modified_base 18: mod_base = OTHER; note = 2'-O-methylcytidine-3'-phosphate
  modified_base 19: mod_base = OTHER; note = 2'-O-methylcytidine-3'-phosphate
  modified_base 20: mod_base = OTHER; note = 2'-O-methyladenosine-3'-phosphate
  modified_base 21: mod_base = OTHER; note = 2'-O-methylcytidine-3'-phosphate
  modified_base 22: mod_base = OTHER; note = 2'-O-methylcytidine-3'-phosphate
  modified_base 23: mod_base = OTHER; note = 2'-O-methyluridine
ttcaggttgcagtactcccacct

SEQ ID NO: 4978 - RNA, 23 nt, synthetic construct
  source 1..23: mol_type = other RNA
  modified_base 1: mod_base = OTHER; note = 2'-O-methyluridine-3'-phosphate 5'phosphate
  modified_base 2: mod_base = OTHER; note = 2'-deoxy-2'-fluorouridine-3'-phosphate
  modified_base 3: mod_base = OTHER; note = 2'-O-methyluridine-3'-phosphate
  modified_base 4: mod_base = OTHER; note = 2'-O-methylcytidine-3'-phosphate
  modified_base 5: mod_base = OTHER; note = 2'-O-methyladenosine-3'-phosphate
  modified_base 6: mod_base = OTHER; note = 2'-deoxy-2'-fluoroguanosine-3'-phosphate
  modified_base 7: mod_base = OTHER; note = 2'-O-methylguanosine-3'-phosphate
  modified_base 8: mod_base = OTHER; note = 2'-O-methyluridine-3'-phosphate
  modified_base 9: mod_base = OTHER; note = 2'-O-methyluridine-3'-phosphate
  modified_base 10: mod_base = OTHER; note = 2'-O-methylguanosine-3'-phosphate
  modified_base 11: mod_base = OTHER; note = 2'-O-methylcytidine-3'-phosphate
  modified_base 12: mod_base = OTHER; note = 2'-O-methyladenosine-3'-phosphate
  modified_base 13: mod_base = OTHER; note = 2'-O-methylguanosine-3'-phosphate
  modified_base 14: mod_base = OTHER; note = 2'-deoxy-2'-fluorouridine-3'-phosphate
  modified_base 15: mod_base = OTHER; note = 2'-O-methyladenosine-3'-phosphate
  modified_base 16: mod_base = OTHER; note = 2'-deoxy-2'-fluorocytidine-3'-phosphate
  modified_base 17: mod_base = OTHER; note = 2'-O-methyluridine-3'-phosphate
  modified_base 18: mod_base = OTHER; note = 2'-O-methylcytidine-3'-phosphate
  modified_base 19: mod_base = OTHER; note = 2'-O-methylcytidine-3'-phosphate
  modified_base 20: mod_base = OTHER; note = 2'-O-methylcytidine-3'-phosphate
  modified_base 21: mod_base = OTHER; note = 2'-O-methyladenosine-3'-phosphate
  modified_base 22: mod_base = OTHER; note = 2'-O-methylcytidine-3'-phosphate
  modified_base 23: mod_base = OTHER; note = 2'-O-methylcytidine
tttcaggttgcagtactcccacc

SEQ ID NO: 4979 - RNA, 23 nt, synthetic construct
  source 1..23: mol_type = other RNA
  modified_base 1: mod_base = OTHER; note = 2'-O-methyluridine-3'-phosphate 5'phosphate
  modified_base 2: mod_base = OTHER; note = 2'-deoxy-2'-fluorouridine-3'-phosphate
  modified_base 3: mod_base = OTHER; note = 2'-O-methyluridine-3'-phosphate
  modified_base 4: mod_base = OTHER; note = 2'-O-methyluridine-3'-phosphate
  modified_base 5: mod_base = OTHER; note = 2'-O-methylcytidine-3'-phosphate
  modified_base 6: mod_base = OTHER; note = 2'-deoxy-2'-fluoroadenosine-3'-phosphate
  modified_base 7: mod_base = OTHER; note = 2'-O-methylguanosine-3'-phosphate
  modified_base 8: mod_base = OTHER; note = 2'-O-methylguanosine-3'-phosphate
  modified_base 9: mod_base = OTHER; note = 2'-O-methyluridine-3'-phosphate
  modified_base 10: mod_base = OTHER; note = 2'-O-methyluridine-3'-phosphate
  modified_base 11: mod_base = OTHER; note = 2'-O-methylguanosine-3'-phosphate
  modified_base 12: mod_base = OTHER; note = 2'-O-methylcytidine-3'-phosphate
  modified_base 13: mod_base = OTHER; note = 2'-O-methyladenosine-3'-phosphate
  modified_base 14: mod_base = OTHER; note = 2'-deoxy-2'-fluoroguanosine-3'-phosphate
  modified_base 15: mod_base = OTHER; note = 2'-O-methyluridine-3'-phosphate
  modified_base 16: mod_base = OTHER; note = 2'-deoxy-2'-fluoroadenosine-3'-phosphate
  modified_base 17: mod_base = OTHER; note = 2'-O-methylcytidine-3'-phosphate
  modified_base 18: mod_base = OTHER; note = 2'-O-methyluridine-3'-phosphate
  modified_base 19: mod_base = OTHER; note = 2'-O-methylcytidine-3'-phosphate
  modified_base 20: mod_base = OTHER; note = 2'-O-methylcytidine-3'-phosphate
  modified_base 21: mod_base = OTHER; note = 2'-O-methylcytidine-3'-phosphate
  modified_base 22: mod_base = OTHER; note = 2'-O-methyladenosine-3'-phosphate
  modified_base 23: mod_base = OTHER; note = 2'-O-methylcytidine
ttttcaggttgcagtactcccac

SEQ ID NO: 4980 - RNA, 23 nt, synthetic construct
  source 1..23: mol_type = other RNA
  modified_base 1: mod_base = OTHER; note = 2'-O-methyluridine-3'-phosphate 5'phosphate
  modified_base 2: mod_base = OTHER; note = 2'-deoxy-2'-fluorouridine-3'-phosphate
  modified_base 3: mod_base = OTHER; note = 2'-O-methyluridine-3'-phosphate
  modified_base 4: mod_base = OTHER; note = 2'-O-methyluridine-3'-phosphate
  modified_base 5: mod_base = OTHER; note = 2'-O-methyluridine-3'-phosphate
  modified_base 6: mod_base = OTHER; note = 2'-deoxy-2'-fluorocytidine-3'-phosphate
  modified_base 7: mod_base = OTHER; note = 2'-O-methyladenosine-3'-phosphate
  modified_base 8: mod_base = OTHER; note = 2'-O-methylguanosine-3'-phosphate
  modified_base 9: mod_base = OTHER; note = 2'-O-methylguanosine-3'-phosphate
  modified_base 10: mod_base = OTHER; note = 2'-O-methyluridine-3'-phosphate
  modified_base 11: mod_base = OTHER; note = 2'-O-methyluridine-3'-phosphate
  modified_base 12: mod_base = OTHER; note = 2'-O-methylguanosine-3'-phosphate
  modified_base 13: mod_base = OTHER; note = 2'-O-methylcytidine-3'-phosphate
  modified_base 14: mod_base = OTHER; note = 2'-deoxy-2'-fluoroadenosine-3'-phosphate
  modified_base 15: mod_base = OTHER; note = 2'-O-methylguanosine-3'-phosphate
  modified_base 16: mod_base = OTHER; note = 2'-deoxy-2'-fluorouridine-3'-phosphate
  modified_base 17: mod_base = OTHER; note = 2'-O-methyladenosine-3'-phosphate
  modified_base 18: mod_base = OTHER; note = 2'-O-methylcytidine-3'-phosphate
  modified_base 19: mod_base = OTHER; note = 2'-O-methyluridine-3'-phosphate
  modified_base 20: mod_base = OTHER; note = 2'-O-methylcytidine-3'-phosphate
  modified_base 21: mod_base = OTHER; note = 2'-O-methylcytidine-3'-phosphate
  modified_base 22: mod_base = OTHER; note = 2'-O-methylcytidine-3'-phosphate
  modified_base 23: mod_base = OTHER; note = 2'-O-methyladenosine
tttttcaggttgcagtactccca

SEQ ID NO: 4981 - RNA, 23 nt, synthetic construct
  source 1..23: mol_type = other RNA
  modified_base 1: mod_base = OTHER; note = 2'-O-methyluridine-3'-phosphate 5'phosphate
  modified_base 2: mod_base = OTHER; note = 2'-deoxy-2'-fluorouridine-3'-phosphate
  modified_base 3: mod_base = OTHER; note = 2'-O-methyluridine-3'-phosphate
  modified_base 4: mod_base = OTHER; note = 2'-O-methyluridine-3'-phosphate
  modified_base 5: mod_base = OTHER; note = 2'-O-methyluridine-3'-phosphate
  modified_base 6: mod_base = OTHER; note = 2'-deoxy-2'-fluorouridine-3'-phosphate
  modified_base 7: mod_base = OTHER; note = 2'-O-methylcytidine-3'-phosphate
  modified_base 8: mod_base = OTHER; note = 2'-O-methyladenosine-3'-phosphate
  modified_base 9: mod_base = OTHER; note = 2'-O-methylguanosine-3'-phosphate
  modified_base 10: mod_base = OTHER; note = 2'-O-methylguanosine-3'-phosphate
  modified_base 11: mod_base = OTHER; note = 2'-O-methyluridine-3'-phosphate
  modified_base 12: mod_base = OTHER; note = 2'-O-methyluridine-3'-phosphate
  modified_base 13: mod_base = OTHER; note = 2'-O-methylguanosine-3'-phosphate
  modified_base 14: mod_base = OTHER; note = 2'-deoxy-2'-fluorocytidine-3'-phosphate
  modified_base 15: mod_base = OTHER; note = 2'-O-methyladenosine-3'-phosphate
  modified_base 16: mod_base = OTHER; note = 2'-deoxy-2'-fluoroguanosine-3'-phosphate
  modified_base 17: mod_base = OTHER; note = 2'-O-methyluridine-3'-phosphate
  modified_base 18: mod_base = OTHER; note = 2'-O-methyladenosine-3'-phosphate
  modified_base 19: mod_base = OTHER; note = 2'-O-methylcytidine-3'-phosphate
  modified_base 20: mod_base = OTHER; note = 2'-O-methyluridine-3'-phosphate
  modified_base 21: mod_base = OTHER; note = 2'-O-methylcytidine-3'-phosphate
  modified_base 22: mod_base = OTHER; note = 2'-O-methylcytidine-3'-phosphate
  modified_base 23: mod_base = OTHER; note = 2'-O-methylcytidine
ttttttcaggttgcagtactccc

SEQ ID NO: 4982 - RNA, 23 nt, synthetic construct
  source 1..23: mol_type = other RNA
  modified_base 1: mod_base = OTHER; note = 2'-O-methyluridine-3'-phosphate 5'phosphate
  modified_base 2: mod_base = OTHER; note = 2'-deoxy-2'-fluorouridine-3'-phosphate
  modified_base 3: mod_base = OTHER; note = 2'-O-methyluridine-3'-phosphate
  modified_base 4: mod_base = OTHER; note = 2'-O-methyluridine-3'-phosphate
  modified_base 5: mod_base = OTHER; note = 2'-O-methyluridine-3'-phosphate
  modified_base 6: mod_base = OTHER; note = 2'-deoxy-2'-fluorouridine-3'-phosphate
  modified_base 7: mod_base = OTHER; note = 2'-O-methyluridine-3'-phosphate
  modified_base 8: mod_base = OTHER; note = 2'-O-methylcytidine-3'-phosphate
  modified_base 9: mod_base = OTHER; note = 2'-O-methyladenosine-3'-phosphate
  modified_base 10: mod_base = OTHER; note = 2'-O-methylguanosine-3'-phosphate
  modified_base 11: mod_base = OTHER; note = 2'-O-methylguanosine-3'-phosphate
  modified_base 12: mod_base = OTHER; note = 2'-O-methyluridine-3'-phosphate
  modified_base 13: mod_base = OTHER; note = 2'-O-methyluridine-3'-phosphate
  modified_base 14: mod_base = OTHER; note = 2'-deoxy-2'-fluoroguanosine-3'-phosphate
  modified_base 15: mod_base = OTHER; note = 2'-O-methylcytidine-3'-phosphate
  modified_base 16: mod_base = OTHER; note = 2'-deoxy-2'-fluoroadenosine-3'-phosphate
  modified_base 17: mod_base = OTHER; note = 2'-O-methylguanosine-3'-phosphate
  modified_base 18: mod_base = OTHER; note = 2'-O-methyluridine-3'-phosphate
  modified_base 19: mod_base = OTHER; note = 2'-O-methyladenosine-3'-phosphate
  modified_base 20: mod_base = OTHER; note = 2'-O-methylcytidine-3'-phosphate
  modified_base 21: mod_base = OTHER; note = 2'-O-methyluridine-3'-phosphate
  modified_base 22: mod_base = OTHER; note = 2'-O-methylcytidine-3'-phosphate
  modified_base 23: mod_base = OTHER; note = 2'-O-methylcytidine
tttttttcaggttgcagtactcc

SEQ ID NO: 4983 - RNA, 23 nt, synthetic construct
  source 1..23: mol_type = other RNA
  modified_base 1: mod_base = OTHER; note = 2'-O-methyluridine-3'-phosphate 5'phosphate
  modified_base 2: mod_base = OTHER; note = 2'-deoxy-2'-fluoroadenosine-3'-phosphate
  modified_base 3: mod_base = OTHER; note = 2'-O-methyluridine-3'-phosphate
  modified_base 4: mod_base = OTHER; note = 2'-O-methyluridine-3'-phosphate
  modified_base 5: mod_base = OTHER; note = 2'-O-methyluridine-3'-phosphate
  modified_base 6: mod_base = OTHER; note = 2'-deoxy-2'-fluorouridine-3'-phosphate
  modified_base 7: mod_base = OTHER; note = 2'-O-methyluridine-3'-phosphate
  modified_base 8: mod_base = OTHER; note = 2'-O-methyluridine-3'-phosphate
  modified_base 9: mod_base = OTHER; note = 2'-O-methylcytidine-3'-phosphate
  modified_base 10: mod_base = OTHER; note = 2'-O-methyladenosine-3'-phosphate
  modified_base 11: mod_base = OTHER; note = 2'-O-methylguanosine-3'-phosphate
  modified_base 12: mod_base = OTHER; note = 2'-O-methylguanosine-3'-phosphate
  modified_base 13: mod_base = OTHER; note = 2'-O-methyluridine-3'-phosphate
  modified_base 14: mod_base = OTHER; note = 2'-deoxy-2'-fluorouridine-3'-phosphate
  modified_base 15: mod_base = OTHER; note = 2'-O-methylguanosine-3'-phosphate
  modified_base 16: mod_base = OTHER; note = 2'-deoxy-2'-fluorocytidine-3'-phosphate
  modified_base 17: mod_base = OTHER; note = 2'-O-methyladenosine-3'-phosphate
  modified_base 18: mod_base = OTHER; note = 2'-O-methylguanosine-3'-phosphate
  modified_base 19: mod_base = OTHER; note = 2'-O-methyluridine-3'-phosphate
  modified_base 20: mod_base = OTHER; note = 2'-O-methyladenosine-3'-phosphate
  modified_base 21: mod_base = OTHER; note = 2'-O-methylcytidine-3'-phosphate
  modified_base 22: mod_base = OTHER; note = 2'-O-methyluridine-3'-phosphate
  modified_base 23: mod_base = OTHER; note = 2'-O-methylcytidine
tattttttcaggttgcagtactc

SEQ ID NO: 4984 - RNA, 23 nt, synthetic construct
  source 1..23: mol_type = other RNA
  modified_base 1: mod_base = OTHER; note = 2'-O-methyluridine-3'-phosphate 5'phosphate
  modified_base 2: mod_base = OTHER; note = 2'-deoxy-2'-fluorocytidine-3'-phosphate
  modified_base 3: mod_base = OTHER; note = 2'-O-methyladenosine-3'-phosphate
  modified_base 4: mod_base = OTHER; note = 2'-O-methyluridine-3'-phosphate
  modified_base 5: mod_base = OTHER; note = 2'-O-methyluridine-3'-phosphate
  modified_base 6: mod_base = OTHER; note = 2'-deoxy-2'-fluorouridine-3'-phosphate
  modified_base 7: mod_base = OTHER; note = 2'-O-methyluridine-3'-phosphate
  modified_base 8: mod_base = OTHER; note = 2'-O-methyluridine-3'-phosphate
  modified_base 9: mod_base = OTHER; note = 2'-O-methyluridine-3'-phosphate
  modified_base 10: mod_base = OTHER; note = 2'-O-methylcytidine-3'-phosphate
  modified_base 11: mod_base = OTHER; note = 2'-O-methyladenosine-3'-phosphate
  modified_base 12: mod_base = OTHER; note = 2'-O-methylguanosine-3'-phosphate
  modified_base 13: mod_base = OTHER; note = 2'-O-methylguanosine-3'-phosphate
  modified_base 14: mod_base = OTHER; note = 2'-deoxy-2'-fluorouridine-3'-phosphate
  modified_base 15: mod_base = OTHER; note = 2'-O-methyluridine-3'-phosphate
  modified_base 16: mod_base = OTHER; note = 2'-deoxy-2'-fluoroguanosine-3'-phosphate
  modified_base 17: mod_base = OTHER; note = 2'-O-methylcytidine-3'-phosphate
  modified_base 18: mod_base = OTHER; note = 2'-O-methyladenosine-3'-phosphate
  modified_base 19: mod_base = OTHER; note = 2'-O-methylguanosine-3'-phosphate
  modified_base 20: mod_base = OTHER; note = 2'-O-methyluridine-3'-phosphate
  modified_base 21: mod_base = OTHER; note = 2'-O-methyladenosine-3'-phosphate
  modified_base 22: mod_base = OTHER; note = 2'-O-methylcytidine-3'-phosphate
  modified_base 23: mod_base = OTHER; note = 2'-O-methyluridine
tcattttttcaggttgcagtact

SEQ ID NO: 4985 - RNA, 23 nt, synthetic construct
  source 1..23: mol_type = other RNA
  modified_base 1: mod_base = OTHER; note = 2'-O-methyluridine-3'-phosphate 5'phosphate
  modified_base 2: mod_base = OTHER; note = 2'-deoxy-2'-fluoroguanosine-3'-phosphate
  modified_base 3: mod_base = OTHER; note = 2'-O-methylcytidine-3'-phosphate
  modified_base 4: mod_base = OTHER; note = 2'-O-methyladenosine-3'-phosphate
  modified_base 5: mod_base = OTHER; note = 2'-O-methyluridine-3'-phosphate
  modified_base 6: mod_base = OTHER; note = 2'-deoxy-2'-fluorouridine-3'-phosphate
  modified_base 7: mod_base = OTHER; note = 2'-O-methyluridine-3'-phosphate
  modified_base 8: mod_base = OTHER; note = 2'-O-methyluridine-3'-phosphate
  modified_base 9: mod_base = OTHER; note = 2'-O-methyluridine-3'-phosphate
  modified_base 10: mod_base = OTHER; note = 2'-O-methyluridine-3'-phosphate
  modified_base 11: mod_base = OTHER; note = 2'-O-methylcytidine-3'-phosphate
  modified_base 12: mod_base = OTHER; note = 2'-O-methyladenosine-3'-phosphate
  modified_base 13: mod_base = OTHER; note = 2'-O-methylguanosine-3'-phosphate
  modified_base 14: mod_base = OTHER; note = 2'-deoxy-2'-fluoroguanosine-3'-phosphate
  modified_base 15: mod_base = OTHER; note = 2'-O-methyluridine-3'-phosphate
  modified_base 16: mod_base = OTHER; note = 2'-deoxy-2'-fluorouridine-3'-phosphate
  modified_base 17: mod_base = OTHER; note = 2'-O-methylguanosine-3'-phosphate
  modified_base 18: mod_base = OTHER; note = 2'-O-methylcytidine-3'-phosphate
  modified_base 19: mod_base = OTHER; note = 2'-O-methyladenosine-3'-phosphate
  modified_base 20: mod_base = OTHER; note = 2'-O-methylguanosine-3'-phosphate
  modified_base 21: mod_base = OTHER; note = 2'-O-methyluridine-3'-phosphate
  modified_base 22: mod_base = OTHER; note = 2'-O-methyladenosine-3'-phosphate
  modified_base 23: mod_base = OTHER; note = 2'-O-methylcytidine
tgcattttttcaggttgcagtac

SEQ ID NO: 4986 - RNA, 23 nt, synthetic construct
  source 1..23: mol_type = other RNA
  modified_base 1: mod_base = OTHER; note = 2'-O-methyluridine-3'-phosphate 5'phosphate
  modified_base 2: mod_base = OTHER; note = 2'-deoxy-2'-fluoroadenosine-3'-phosphate
  modified_base 3: mod_base = OTHER; note = 2'-O-methylguanosine-3'-phosphate
  modified_base 4: mod_base = OTHER; note = 2'-O-methylcytidine-3'-phosphate
  modified_base 5: mod_base = OTHER; note = 2'-O-methyladenosine-3'-phosphate
  modified_base 6: mod_base = OTHER; note = 2'-deoxy-2'-fluorouridine-3'-phosphate
  modified_base 7: mod_base = OTHER; note = 2'-O-methyluridine-3'-phosphate
  modified_base 8: mod_base = OTHER; note = 2'-O-methyluridine-3'-phosphate
  modified_base 9: mod_base = OTHER; note = 2'-O-methyluridine-3'-phosphate
  modified_base 10: mod_base = OTHER; note = 2'-O-methyluridine-3'-phosphate
  modified_base 11: mod_base = OTHER; note = 2'-O-methyluridine-3'-phosphate
  modified_base 12: mod_base = OTHER; note = 2'-O-methylcytidine-3'-phosphate
  modified_base 13: mod_base = OTHER; note = 2'-O-methyladenosine-3'-phosphate
  modified_base 14: mod_base = OTHER; note = 2'-deoxy-2'-fluoroguanosine-3'-phosphate
  modified_base 15: mod_base = OTHER; note = 2'-O-methylguanosine-3'-phosphate
  modified_base 16: mod_base = OTHER; note = 2'-deoxy-2'-fluorouridine-3'-phosphate
  modified_base 17: mod_base = OTHER; note = 2'-O-methyluridine-3'-phosphate
  modified_base 18: mod_base = OTHER; note = 2'-O-methylguanosine-3'-phosphate
  modified_base 19: mod_base = OTHER; note = 2'-O-methylcytidine-3'-phosphate
  modified_base 20: mod_base = OTHER; note = 2'-O-methyladenosine-3'-phosphate
  modified_base 21: mod_base = OTHER; note = 2'-O-methylguanosine-3'-phosphate
  modified_base 22: mod_base = OTHER; note = 2'-O-methyluridine-3'-phosphate
  modified_base 23: mod_base = OTHER; note = 2'-O-methyladenosine
tagcattttttcaggttgcagta

SEQ ID NO: 4987 - RNA, 23 nt, synthetic construct
  source 1..23: mol_type = other RNA
  modified_base 1: mod_base = OTHER; note = 2'-O-methyluridine-3'-phosphate 5'phosphate
  modified_base 2: mod_base = OTHER; note = 2'-deoxy-2'-fluoroguanosine-3'-phosphate
  modified_base 3: mod_base = OTHER; note = 2'-O-methyladenosine-3'-phosphate
  modified_base 4: mod_base = OTHER; note = 2'-O-methylguanosine-3'-phosphate
  modified_base 5: mod_base = OTHER; note = 2'-O-methylcytidine-3'-phosphate
  modified_base 6: mod_base = OTHER; note = 2'-deoxy-2'-fluoroadenosine-3'-phosphate
  modified_base 7: mod_base = OTHER; note = 2'-O-methyluridine-3'-phosphate
  modified_base 8: mod_base = OTHER; note = 2'-O-methyluridine-3'-phosphate
  modified_base 9: mod_base = OTHER; note = 2'-O-methyluridine-3'-phosphate
  modified_base 10: mod_base = OTHER; note = 2'-O-methyluridine-3'-phosphate
  modified_base 11: mod_base = OTHER; note = 2'-O-methyluridine-3'-phosphate
  modified_base 12: mod_base = OTHER; note = 2'-O-methyluridine-3'-phosphate
  modified_base 13: mod_base = OTHER; note = 2'-O-methylcytidine-3'-phosphate
  modified_base 14: mod_base = OTHER; note = 2'-deoxy-2'-fluoroadenosine-3'-phosphate
  modified_base 15: mod_base = OTHER; note = 2'-O-methylguanosine-3'-phosphate
  modified_base 16: mod_base = OTHER; note = 2'-deoxy-2'-fluoroguanosine-3'-phosphate
  modified_base 17: mod_base = OTHER; note = 2'-O-methyluridine-3'-phosphate
  modified_base 18: mod_base = OTHER; note = 2'-O-methyluridine-3'-phosphate
  modified_base 19: mod_base = OTHER; note = 2'-O-methylguanosine-3'-phosphate
  modified_base 20: mod_base = OTHER; note = 2'-O-methylcytidine-3'-phosphate
  modified_base 21: mod_base = OTHER; note = 2'-O-methyladenosine-3'-phosphate
  modified_base 22: mod_base = OTHER; note = 2'-O-methylguanosine-3'-phosphate
  modified_base 23: mod_base = OTHER; note = 2'-O-methyluridine
tgagcattttttcaggttgcagt

SEQ ID NO: 4988 - RNA, 23 nt, synthetic construct
  source 1..23: mol_type = other RNA
  modified_base 1: mod_base = OTHER; note = 2'-O-methyluridine-3'-phosphate 5'phosphate
  modified_base 2: mod_base = OTHER; note = 2'-deoxy-2'-fluorouridine-3'-phosphate
  modified_base 3: mod_base = OTHER; note = 2'-O-methylguanosine-3'-phosphate
  modified_base 4: mod_base = OTHER; note = 2'-O-methyladenosine-3'-phosphate
  modified_base 5: mod_base = OTHER; note = 2'-O-methylguanosine-3'-phosphate
  modified_base 6: mod_base = OTHER; note = 2'-deoxy-2'-fluorocytidine-3'-phosphate
  modified_base 7: mod_base = OTHER; note = 2'-O-methyladenosine-3'-phosphate
  modified_base 8: mod_base = OTHER; note = 2'-O-methyluridine-3'-phosphate
  modified_base 9: mod_base = OTHER; note = 2'-O-methyluridine-3'-phosphate
  modified_base 10: mod_base = OTHER; note = 2'-O-methyluridine-3'-phosphate
  modified_base 11: mod_base = OTHER; note = 2'-O-methyluridine-3'-phosphate
  modified_base 12: mod_base = OTHER; note = 2'-O-methyluridine-3'-phosphate
  modified_base 13: mod_base = OTHER; note = 2'-O-methyluridine-3'-phosphate
  modified_base 14: mod_base = OTHER; note = 2'-deoxy-2'-fluorocytidine-3'-phosphate
  modified_base 15: mod_base = OTHER; note = 2'-O-methyladenosine-3'-phosphate
  modified_base 16: mod_base = OTHER; note = 2'-deoxy-2'-fluoroguanosine-3'-phosphate
  modified_base 17: mod_base = OTHER; note = 2'-O-methylguanosine-3'-phosphate
  modified_base 18: mod_base = OTHER; note = 2'-O-methyluridine-3'-phosphate
  modified_base 19: mod_base = OTHER; note = 2'-O-methyluridine-3'-phosphate
  modified_base 20: mod_base = OTHER; note = 2'-O-methylguanosine-3'-phosphate
  modified_base 21: mod_base = OTHER; note = 2'-O-methylcytidine-3'-phosphate
  modified_base 22: mod_base = OTHER; note = 2'-O-methyladenosine-3'-phosphate
  modified_base 23: mod_base = OTHER; note = 2'-O-methylguanosine
ttgagcattttttcaggttgcag

SEQ ID NO: 4989 - RNA, 23 nt, synthetic construct
  source 1..23: mol_type = other RNA
  modified_base 1: mod_base = OTHER; note = 2'-O-methyluridine-3'-phosphate 5'phosphate
  modified_base 2: mod_base = OTHER; note = 2'-deoxy-2'-fluorocytidine-3'-phosphate
  modified_base 3: mod_base = OTHER; note = 2'-O-methyluridine-3'-phosphate
  modified_base 4: mod_base = OTHER; note = 2'-O-methylguanosine-3'-phosphate
  modified_base 5: mod_base = OTHER; note = 2'-O-methyladenosine-3'-phosphate
  modified_base 6: mod_base = OTHER; note = 2'-deoxy-2'-fluoroguanosine-3'-phosphate
  modified_base 7: mod_base = OTHER; note = 2'-O-methylcytidine-3'-phosphate
  modified_base 8: mod_base = OTHER; note = 2'-O-methyladenosine-3'-phosphate
  modified_base 9: mod_base = OTHER; note = 2'-O-methyluridine-3'-phosphate
  modified_base 10: mod_base = OTHER; note = 2'-O-methyluridine-3'-phosphate
  modified_base 11: mod_base = OTHER; note = 2'-O-methyluridine-3'-phosphate
  modified_base 12: mod_base = OTHER; note = 2'-O-methyluridine-3'-phosphate
  modified_base 13: mod_base = OTHER; note = 2'-O-methyluridine-3'-phosphate
  modified_base 14: mod_base = OTHER; note = 2'-deoxy-2'-fluorouridine-3'-phosphate
  modified_base 15: mod_base = OTHER; note = 2'-O-methylcytidine-3'-phosphate
  modified_base 16: mod_base = OTHER; note = 2'-deoxy-2'-fluoroadenosine-3'-phosphate
  modified_base 17: mod_base = OTHER; note = 2'-O-methylguanosine-3'-phosphate
  modified_base 18: mod_base = OTHER; note = 2'-O-methylguanosine-3'-phosphate
  modified_base 19: mod_base = OTHER; note = 2'-O-methyluridine-3'-phosphate
  modified_base 20: mod_base = OTHER; note = 2'-O-methyluridine-3'-phosphate
  modified_base 21: mod_base = OTHER; note = 2'-O-methylguanosine-3'-phosphate
  modified_base 22: mod_base = OTHER; note = 2'-O-methylcytidine-3'-phosphate
  modified_base 23: mod_base = OTHER; note = 2'-O-methyladenosine
tctgagcattttttcaggttgca

SEQ ID NO: 4990 - RNA, 23 nt, synthetic construct
  source 1..23: mol_type = other RNA
  modified_base 1: mod_base = OTHER; note = 2'-O-methyluridine-3'-phosphate 5'phosphate
  modified_base 2: mod_base = OTHER; note = 2'-deoxy-2'-fluorocytidine-3'-phosphate
  modified_base 3: mod_base = OTHER; note = 2'-O-methylcytidine-3'-phosphate
  modified_base 4: mod_base = OTHER; note = 2'-O-methyluridine-3'-phosphate
  modified_base 5: mod_base = OTHER; note = 2'-O-methylguanosine-3'-phosphate
  modified_base 6: mod_base = OTHER; note = 2'-deoxy-2'-fluoroadenosine-3'-phosphate
  modified_base 7: mod_base = OTHER; note = 2'-O-methylguanosine-3'-phosphate
  modified_base 8: mod_base = OTHER; note = 2'-O-methylcytidine-3'-phosphate
  modified_base 9: mod_base = OTHER; note = 2'-O-methyladenosine-3'-phosphate
  modified_base 10: mod_base = OTHER; note = 2'-O-methyluridine-3'-phosphate
  modified_base 11: mod_base = OTHER; note = 2'-O-methyluridine-3'-phosphate
  modified_base 12: mod_base = OTHER; note = 2'-O-methyluridine-3'-phosphate
  modified_base 13: mod_base = OTHER; note = 2'-O-methyluridine-3'-phosphate
  modified_base 14: mod_base = OTHER; note = 2'-deoxy-2'-fluorouridine-3'-phosphate
  modified_base 15: mod_base = OTHER; note = 2'-O-methyluridine-3'-phosphate
  modified_base 16: mod_base = OTHER; note = 2'-deoxy-2'-fluorocytidine-3'-phosphate
  modified_base 17: mod_base = OTHER; note = 2'-O-methyladenosine-3'-phosphate
  modified_base 18: mod_base = OTHER; note = 2'-O-methylguanosine-3'-phosphate
  modified_base 19: mod_base = OTHER; note = 2'-O-methylguanosine-3'-phosphate
  modified_base 20: mod_base = OTHER; note = 2'-O-methyluridine-3'-phosphate
  modified_base 21: mod_base = OTHER; note = 2'-O-methyluridine-3'-phosphate
  modified_base 22: mod_base = OTHER; note = 2'-O-methylguanosine-3'-phosphate
  modified_base 23: mod_base = OTHER; note = 2'-O-methylcytidine
tcctgagcattttttcaggttgc

SEQ ID NO: 4991 - RNA, 23 nt, synthetic construct
  source 1..23: mol_type = other RNA
  modified_base 1: mod_base = OTHER; note = 2'-O-methyluridine-3'-phosphate 5'phosphate
  modified_base 2: mod_base = OTHER; note = 2'-deoxy-2'-fluorouridine-3'-phosphate
  modified_base 3: mod_base = OTHER; note = 2'-O-methylcytidine-3'-phosphate
  modified_base 4: mod_base = OTHER; note = 2'-O-methylcytidine-3'-phosphate
  modified_base 5: mod_base = OTHER; note = 2'-O-methyluridine-3'-phosphate
  modified_base 6: mod_base = OTHER; note = 2'-deoxy-2'-fluoroguanosine-3'-phosphate
  modified_base 7: mod_base = OTHER; note = 2'-O-methyladenosine-3'-phosphate
  modified_base 8: mod_base = OTHER; note = 2'-O-methylguanosine-3'-phosphate
  modified_base 9: mod_base = OTHER; note = 2'-O-methylcytidine-3'-phosphate
  modified_base 10: mod_base = OTHER; note = 2'-O-methyladenosine-3'-phosphate
  modified_base 11: mod_base = OTHER; note = 2'-O-methyluridine-3'-phosphate
  modified_base 12: mod_base = OTHER; note = 2'-O-methyluridine-3'-phosphate
  modified_base 13: mod_base = OTHER; note = 2'-O-methyluridine-3'-phosphate
  modified_base 14: mod_base = OTHER; note = 2'-deoxy-2'-fluorouridine-3'-phosphate
  modified_base 15: mod_base = OTHER; note = 2'-O-methyluridine-3'-phosphate
  modified_base 16: mod_base = OTHER; note = 2'-deoxy-2'-fluorouridine-3'-phosphate
  modified_base 17: mod_base = OTHER; note = 2'-O-methylcytidine-3'-phosphate
  modified_base 18: mod_base = OTHER; note = 2'-O-methyladenosine-3'-phosphate
  modified_base 19: mod_base = OTHER; note = 2'-O-methylguanosine-3'-phosphate
  modified_base 20: mod_base = OTHER; note = 2'-O-methylguanosine-3'-phosphate
  modified_base 21: mod_base = OTHER; note = 2'-O-methyluridine-3'-phosphate
  modified_base 22: mod_base = OTHER; note = 2'-O-methyluridine-3'-phosphate
  modified_base 23: mod_base = OTHER; note = 2'-O-methylguanosine
ttcctgagcattttttcaggttg

SEQ ID NO: 4992 - RNA, 23 nt, synthetic construct
  source 1..23: mol_type = other RNA
  modified_base 1: mod_base = OTHER; note = 2'-O-methyluridine-3'-phosphate 5'phosphate
  modified_base 2: mod_base = OTHER; note = 2'-deoxy-2'-fluorouridine-3'-phosphate
  modified_base 3: mod_base = OTHER; note = 2'-O-methyluridine-3'-phosphate
  modified_base 4: mod_base = OTHER; note = 2'-O-methylcytidine-3'-phosphate
  modified_base 5: mod_base = OTHER; note = 2'-O-methylcytidine-3'-phosphate
  modified_base 6: mod_base = OTHER; note = 2'-deoxy-2'-fluorouridine-3'-phosphate
  modified_base 7: mod_base = OTHER; note = 2'-O-methylguanosine-3'-phosphate
  modified_base 8: mod_base = OTHER; note = 2'-O-methyladenosine-3'-phosphate
  modified_base 9: mod_base = OTHER; note = 2'-O-methylguanosine-3'-phosphate
  modified_base 10: mod_base = OTHER; note = 2'-O-methylcytidine-3'-phosphate
  modified_base 11: mod_base = OTHER; note = 2'-O-methyladenosine-3'-phosphate
  modified_base 12: mod_base = OTHER; note = 2'-O-methyluridine-3'-phosphate
  modified_base 13: mod_base = OTHER; note = 2'-O-methyluridine-3'-phosphate
  modified_base 14: mod_base = OTHER; note = 2'-deoxy-2'-fluorouridine-3'-phosphate
  modified_base 15: mod_base = OTHER; note = 2'-O-methyluridine-3'-phosphate
  modified_base 16: mod_base = OTHER; note = 2'-deoxy-2'-fluorouridine-3'-phosphate
  modified_base 17: mod_base = OTHER; note = 2'-O-methyluridine-3'-phosphate
  modified_base 18: mod_base = OTHER; note = 2'-O-methylcytidine-3'-phosphate
  modified_base 19: mod_base = OTHER; note = 2'-O-methyladenosine-3'-phosphate
  modified_base 20: mod_base = OTHER; note = 2'-O-methylguanosine-3'-phosphate
  modified_base 21: mod_base = OTHER; note = 2'-O-methylguanosine-3'-phosphate
  modified_base 22: mod_base = OTHER; note = 2'-O-methyluridine-3'-phosphate
  modified_base 23: mod_base = OTHER; note = 2'-O-methyluridine
tttcctgagcattttttcaggtt

SEQ ID NO: 4993 - RNA, 23 nt, synthetic construct
  source 1..23: mol_type = other RNA
  modified_base 1: mod_base = OTHER; note = 2'-O-methyluridine-3'-phosphate 5'phosphate
  modified_base 2: mod_base = OTHER; note = 2'-deoxy-2'-fluoroguanosine-3'-phosphate
  modified_base 3: mod_base = OTHER; note = 2'-O-methyluridine-3'-phosphate
  modified_base 4: mod_base = OTHER; note = 2'-O-methyluridine-3'-phosphate
  modified_base 5: mod_base = OTHER; note = 2'-O-methylcytidine-3'-phosphate
  modified_base 6: mod_base = OTHER; note = 2'-deoxy-2'-fluorocytidine-3'-phosphate
  modified_base 7: mod_base = OTHER; note = 2'-O-methyluridine-3'-phosphate
  modified_base 8: mod_base = OTHER; note = 2'-O-methylguanosine-3'-phosphate
  modified_base 9: mod_base = OTHER; note = 2'-O-methyladenosine-3'-phosphate
  modified_base 10: mod_base = OTHER; note = 2'-O-methylguanosine-3'-phosphate
  modified_base 11: mod_base = OTHER; note = 2'-O-methylcytidine-3'-phosphate
  modified_base 12: mod_base = OTHER; note = 2'-O-methyladenosine-3'-phosphate
  modified_base 13: mod_base = OTHER; note = 2'-O-methyluridine-3'-phosphate
  modified_base 14: mod_base = OTHER; note = 2'-deoxy-2'-fluorouridine-3'-phosphate
  modified_base 15: mod_base = OTHER; note = 2'-O-methyluridine-3'-phosphate
  modified_base 16: mod_base = OTHER; note = 2'-deoxy-2'-fluorouridine-3'-phosphate
  modified_base 17: mod_base = OTHER; note = 2'-O-methyluridine-3'-phosphate
  modified_base 18: mod_base = OTHER; note = 2'-O-methyluridine-3'-phosphate
  modified_base 19: mod_base = OTHER; note = 2'-O-methylcytidine-3'-phosphate
  modified_base 20: mod_base = OTHER; note = 2'-O-methyladenosine-3'-phosphate
  modified_base 21: mod_base = OTHER; note = 2'-O-methylguanosine-3'-phosphate
  modified_base 22: mod_base = OTHER; note = 2'-O-methylguanosine-3'-phosphate
  modified_base 23: mod_base = OTHER; note = 2'-O-methyluridine
tgttcctgagcattttttcaggt

SEQ ID NO: 4994 - RNA, 23 nt, synthetic construct
  source 1..23: mol_type = other RNA
  modified_base 1: mod_base = OTHER; note = 2'-O-methyluridine-3'-phosphate 5'phosphate
  modified_base 2: mod_base = OTHER; note = 2'-deoxy-2'-fluorouridine-3'-phosphate
  modified_base 3: mod_base = OTHER; note = 2'-O-methylguanosine-3'-phosphate
  modified_base 4: mod_base = OTHER; note = 2'-O-methyluridine-3'-phosphate
  modified_base 5: mod_base = OTHER; note = 2'-O-methyluridine-3'-phosphate
  modified_base 6: mod_base = OTHER; note = 2'-deoxy-2'-fluorocytidine-3'-phosphate
  modified_base 7: mod_base = OTHER; note = 2'-O-methylcytidine-3'-phosphate
  modified_base 8: mod_base = OTHER; note = 2'-O-methyluridine-3'-phosphate
  modified_base 9: mod_base = OTHER; note = 2'-O-methylguanosine-3'-phosphate
  modified_base 10: mod_base = OTHER; note = 2'-O-methyladenosine-3'-phosphate
  modified_base 11: mod_base = OTHER; note = 2'-O-methylguanosine-3'-phosphate
  modified_base 12: mod_base = OTHER; note = 2'-O-methylcytidine-3'-phosphate
  modified_base 13: mod_base = OTHER; note = 2'-O-methyladenosine-3'-phosphate
  modified_base 14: mod_base = OTHER; note = 2'-deoxy-2'-fluorouridine-3'-phosphate
  modified_base 15: mod_base = OTHER; note = 2'-O-methyluridine-3'-phosphate
  modified_base 16: mod_base = OTHER; note = 2'-deoxy-2'-fluorouridine-3'-phosphate
  modified_base 17: mod_base = OTHER; note = 2'-O-methyluridine-3'-phosphate
  modified_base 18: mod_base = OTHER; note = 2'-O-methyluridine-3'-phosphate
  modified_base 19: mod_base = OTHER; note = 2'-O-methyluridine-3'-phosphate
  modified_base 20: mod_base = OTHER; note = 2'-O-methylcytidine-3'-phosphate
  modified_base 21: mod_base = OTHER; note = 2'-O-methyladenosine-3'-phosphate
  modified_base 22: mod_base = OTHER; note = 2'-O-methylguanosine-3'-phosphate
  modified_base 23: mod_base = OTHER; note = 2'-O-methylguanosine
ttgttcctgagcattttttcagg

SEQ ID NO: 4995 - RNA, 23 nt, synthetic construct
  source 1..23: mol_type = other RNA
  modified_base 1: mod_base = OTHER; note = 2'-O-methyluridine-3'-phosphate 5'phosphate
  modified_base 2: mod_base = OTHER; note = 2'-deoxy-2'-fluorocytidine-3'-phosphate
  modified_base 3: mod_base = OTHER; note = 2'-O-methyluridine-3'-phosphate
  modified_base 4: mod_base = OTHER; note = 2'-O-methylguanosine-3'-phosphate
  modified_base 5: mod_base = OTHER; note = 2'-O-methyluridine-3'-phosphate
  modified_base 6: mod_base = OTHER; note = 2'-deoxy-2'-fluorouridine-3'-phosphate
  modified_base 7: mod_base = OTHER; note = 2'-O-methylcytidine-3'-phosphate
  modified_base 8: mod_base = OTHER; note = 2'-O-methylcytidine-3'-phosphate
  modified_base 9: mod_base = OTHER; note = 2'-O-methyluridine-3'-phosphate
  modified_base 10: mod_base = OTHER; note = 2'-O-methylguanosine-3'-phosphate
  modified_base 11: mod_base = OTHER; note = 2'-O-methyladenosine-3'-phosphate
  modified_base 12: mod_base = OTHER; note = 2'-O-methylguanosine-3'-phosphate
  modified_base 13: mod_base = OTHER; note = 2'-O-methylcytidine-3'-phosphate
  modified_base 14: mod_base = OTHER; note = 2'-deoxy-2'-fluoroadenosine-3'-phosphate
  modified_base 15: mod_base = OTHER; note = 2'-O-methyluridine-3'-phosphate
  modified_base 16: mod_base = OTHER; note = 2'-deoxy-2'-fluorouridine-3'-phosphate
  modified_base 17: mod_base = OTHER; note = 2'-O-methyluridine-3'-phosphate
  modified_base 18: mod_base = OTHER; note = 2'-O-methyluridine-3'-phosphate
  modified_base 19: mod_base = OTHER; note = 2'-O-methyluridine-3'-phosphate
  modified_base 20: mod_base = OTHER; note = 2'-O-methyluridine-3'-phosphate
  modified_base 21: mod_base = OTHER; note = 2'-O-methylcytidine-3'-phosphate
  modified_base 22: mod_base = OTHER; note = 2'-O-methyladenosine-3'-phosphate
  modified_base 23: mod_base = OTHER; note = 2'-O-methylguanosine
tctgttcctgagcattttttcag

SEQ ID NO: 4996 - RNA, 23 nt, synthetic construct
  source 1..23: mol_type = other RNA
  modified_base 1: mod_base = OTHER; note = 2'-O-methyluridine-3'-phosphate 5'phosphate
  modified_base 2: mod_base = OTHER; note = 2'-deoxy-2'-fluorouridine-3'-phosphate
  modified_base 3: mod_base = OTHER; note = 2'-O-methylcytidine-3'-phosphate
  modified_base 4: mod_base = OTHER; note = 2'-O-methyluridine-3'-phosphate
  modified_base 5: mod_base = OTHER; note = 2'-O-methylguanosine-3'-phosphate
  modified_base 6: mod_base = OTHER; note = 2'-deoxy-2'-fluorouridine-3'-phosphate
  modified_base 7: mod_base = OTHER; note = 2'-O-methyluridine-3'-phosphate
  modified_base 8: mod_base = OTHER; note = 2'-O-methylcytidine-3'-phosphate
  modified_base 9: mod_base = OTHER; note = 2'-O-methylcytidine-3'-phosphate
  modified_base 10: mod_base = OTHER; note = 2'-O-methyluridine-3'-phosphate
  modified_base 11: mod_base = OTHER; note = 2'-O-methylguanosine-3'-phosphate
  modified_base 12: mod_base = OTHER; note = 2'-O-methyladenosine-3'-phosphate
  modified_base 13: mod_base = OTHER; note = 2'-O-methylguanosine-3'-phosphate
  modified_base 14: mod_base = OTHER; note = 2'-deoxy-2'-fluorocytidine-3'-phosphate
  modified_base 15: mod_base = OTHER; note = 2'-O-methyladenosine-3'-phosphate
  modified_base 16: mod_base = OTHER; note = 2'-deoxy-2'-fluorouridine-3'-phosphate
  modified_base 17: mod_base = OTHER; note = 2'-O-methyluridine-3'-phosphate
  modified_base 18: mod_base = OTHER; note = 2'-O-methyluridine-3'-phosphate
  modified_base 19: mod_base = OTHER; note = 2'-O-methyluridine-3'-phosphate
  modified_base 20: mod_base = OTHER; note = 2'-O-methyluridine-3'-phosphate
  modified_base 21: mod_base = OTHER; note = 2'-O-methyluridine-3'-phosphate
  modified_base 22: mod_base = OTHER; note = 2'-O-methylcytidine-3'-phosphate
  modified_base 23: mod_base = OTHER; note = 2'-O-methyladenosine
ttctgttcctgagcattttttca

SEQ ID NO: 4997 - RNA, 23 nt, synthetic construct
  source 1..23: mol_type = other RNA
  modified_base 1: mod_base = OTHER; note = 2'-O-methyluridine-3'-phosphate 5'phosphate
  modified_base 2: mod_base = OTHER; note = 2'-deoxy-2'-fluorouridine-3'-phosphate
  modified_base 3: mod_base = OTHER; note = 2'-O-methyluridine-3'-phosphate
  modified_base 4: mod_base = OTHER; note = 2'-O-methylcytidine-3'-phosphate
  modified_base 5: mod_base = OTHER; note = 2'-O-methyluridine-3'-phosphate
  modified_base 6: mod_base = OTHER; note = 2'-deoxy-2'-fluoroguanosine-3'-phosphate
  modified_base 7: mod_base = OTHER; note = 2'-O-methyluridine-3'-phosphate
  modified_base 8: mod_base = OTHER; note = 2'-O-methyluridine-3'-phosphate
  modified_base 9: mod_base = OTHER; note = 2'-O-methylcytidine-3'-phosphate
  modified_base 10: mod_base = OTHER; note = 2'-O-methylcytidine-3'-phosphate
  modified_base 11: mod_base = OTHER; note = 2'-O-methyluridine-3'-phosphate
  modified_base 12: mod_base = OTHER; note = 2'-O-methylguanosine-3'-phosphate
  modified_base 13: mod_base = OTHER; note = 2'-O-methyladenosine-3'-phosphate
  modified_base 14: mod_base = OTHER; note = 2'-deoxy-2'-fluoroguanosine-3'-phosphate
  modified_base 15: mod_base = OTHER; note = 2'-O-methylcytidine-3'-phosphate
  modified_base 16: mod_base = OTHER; note = 2'-deoxy-2'-fluoroadenosine-3'-phosphate
  modified_base 17: mod_base = OTHER; note = 2'-O-methyluridine-3'-phosphate
  modified_base 18: mod_base = OTHER; note = 2'-O-methyluridine-3'-phosphate
  modified_base 19: mod_base = OTHER; note = 2'-O-methyluridine-3'-phosphate
  modified_base 20: mod_base = OTHER; note = 2'-O-methyluridine-3'-phosphate
  modified_base 21: mod_base = OTHER; note = 2'-O-methyluridine-3'-phosphate
  modified_base 22: mod_base = OTHER; note = 2'-O-methyluridine-3'-phosphate
  modified_base 23: mod_base = OTHER; note = 2'-O-methylcytidine
tttctgttcctgagcattttttc

SEQ ID NO: 4998 - RNA, 23 nt, synthetic construct
  source 1..23: mol_type = other RNA
  modified_base 1: mod_base = OTHER; note = 2'-O-methyluridine-3'-phosphate 5'phosphate
  modified_base 2: mod_base = OTHER; note = 2'-deoxy-2'-fluorocytidine-3'-phosphate
  modified_base 3: mod_base = OTHER; note = 2'-O-methyluridine-3'-phosphate
  modified_base 4: mod_base = OTHER; note = 2'-O-methyluridine-3'-phosphate
  modified_base 5: mod_base = OTHER; note = 2'-O-methylcytidine-3'-phosphate
  modified_base 6: mod_base = OTHER; note = 2'-deoxy-2'-fluorouridine-3'-phosphate
  modified_base 7: mod_base = OTHER; note = 2'-O-methylguanosine-3'-phosphate
  modified_base 8: mod_base = OTHER; note = 2'-O-methyluridine-3'-phosphate
  modified_base 9: mod_base = OTHER; note = 2'-O-methyluridine-3'-phosphate
  modified_base 10: mod_base = OTHER; note = 2'-O-methylcytidine-3'-phosphate
  modified_base 11: mod_base = OTHER; note = 2'-O-methylcytidine-3'-phosphate
  modified_base 12: mod_base = OTHER; note = 2'-O-methyluridine-3'-phosphate
  modified_base 13: mod_base = OTHER; note = 2'-O-methylguanosine-3'-phosphate
  modified_base 14: mod_base = OTHER; note = 2'-deoxy-2'-fluoroadenosine-3'-phosphate
  modified_base 15: mod_base = OTHER; note = 2'-O-methylguanosine-3'-phosphate
  modified_base 16: mod_base = OTHER; note = 2'-deoxy-2'-fluorocytidine-3'-phosphate
  modified_base 17: mod_base = OTHER; note = 2'-O-methyladenosine-3'-phosphate
  modified_base 18: mod_base = OTHER; note = 2'-O-methyluridine-3'-phosphate
  modified_base 19: mod_base = OTHER; note = 2'-O-methyluridine-3'-phosphate
  modified_base 20: mod_base = OTHER; note = 2'-O-methyluridine-3'-phosphate
  modified_base 21: mod_base = OTHER; note = 2'-O-methyluridine-3'-phosphate
  modified_base 22: mod_base = OTHER; note = 2'-O-methyluridine-3'-phosphate
  modified_base 23: mod_base = OTHER; note = 2'-O-methyluridine
tcttctgttcctgagcatttttt

SEQ ID NO: 4999 - RNA, 23 nt, synthetic construct
  source 1..23: mol_type = other RNA
  modified_base 1: mod_base = OTHER; note = 2'-O-methyluridine-3'-phosphate 5'phosphate
  modified_base 2: mod_base = OTHER; note = 2'-deoxy-2'-fluoroguanosine-3'-phosphate
  modified_base 3: mod_base = OTHER; note = 2'-O-methylcytidine-3'-phosphate
  modified_base 4: mod_base = OTHER; note = 2'-O-methyluridine-3'-phosphate
  modified_base 5: mod_base = OTHER; note = 2'-O-methyluridine-3'-phosphate
  modified_base 6: mod_base = OTHER; note = 2'-deoxy-2'-fluorocytidine-3'-phosphate
  modified_base 7: mod_base = OTHER; note = 2'-O-methyluridine-3'-phosphate
  modified_base 8: mod_base = OTHER; note = 2'-O-methylguanosine-3'-phosphate
  modified_base 9: mod_base = OTHER; note = 2'-O-methyluridine-3'-phosphate
  modified_base 10: mod_base = OTHER; note = 2'-O-methyluridine-3'-phosphate
  modified_base 11: mod_base = OTHER; note = 2'-O-methylcytidine-3'-phosphate
  modified_base 12: mod_base = OTHER; note = 2'-O-methylcytidine-3'-phosphate
  modified_base 13: mod_base = OTHER; note = 2'-O-methyluridine-3'-phosphate
  modified_base 14: mod_base = OTHER; note = 2'-deoxy-2'-fluoroguanosine-3'-phosphate
  modified_base 15: mod_base = OTHER; note = 2'-O-methyladenosine-3'-phosphate
  modified_base 16: mod_base = OTHER; note = 2'-deoxy-2'-fluoroguanosine-3'-phosphate
  modified_base 17: mod_base = OTHER; note = 2'-O-methylcytidine-3'-phosphate
  modified_base 18: mod_base = OTHER; note = 2'-O-methyladenosine-3'-phosphate
  modified_base 19: mod_base = OTHER; note = 2'-O-methyluridine-3'-phosphate
  modified_base 20: mod_base = OTHER; note = 2'-O-methyluridine-3'-phosphate
  modified_base 21: mod_base = OTHER; note = 2'-O-methyluridine-3'-phosphate
  modified_base 22: mod_base = OTHER; note = 2'-O-methyluridine-3'-phosphate
  modified_base 23: mod_base = OTHER; note = 2'-O-methyluridine
tgcttctgttcctgagcattttt

SEQ ID NO: 5000 - RNA, 23 nt, synthetic construct
  source 1..23: mol_type = other RNA
  modified_base 1: mod_base = OTHER; note = 2'-O-methyluridine-3'-phosphate 5'phosphate
  modified_base 2: mod_base = OTHER; note = 2'-deoxy-2'-fluoroadenosine-3'-phosphate
  modified_base 3: mod_base = OTHER; note = 2'-O-methylguanosine-3'-phosphate
  modified_base 4: mod_base = OTHER; note = 2'-O-methylguanosine-3'-phosphate
  modified_base 5: mod_base = OTHER; note = 2'-O-methyladenosine-3'-phosphate
  modified_base 6: mod_base = OTHER; note = 2'-deoxy-2'-fluorocytidine-3'-phosphate
  modified_base 7: mod_base = OTHER; note = 2'-O-methyladenosine-3'-phosphate
  modified_base 8: mod_base = OTHER; note = 2'-O-methyladenosine-3'-phosphate
  modified_base 9: mod_base = OTHER; note = 2'-O-methylcytidine-3'-phosphate
  modified_base 10: mod_base = OTHER; note = 2'-O-methyladenosine-3'-phosphate
  modified_base 11: mod_base = OTHER; note = 2'-O-methylguanosine-3'-phosphate
  modified_base 12: mod_base = OTHER; note = 2'-O-methylguanosine-3'-phosphate
  modified_base 13: mod_base = OTHER; note = 2'-O-methylcytidine-3'-phosphate
  modified_base 14: mod_base = OTHER; note = 2'-deoxy-2'-fluoroguanosine-3'-phosphate
  modified_base 15: mod_base = OTHER; note = 2'-O-methylguanosine-3'-phosphate
  modified_base 16: mod_base = OTHER; note = 2'-deoxy-2'-fluoroadenosine-3'-phosphate
  modified_base 17: mod_base = OTHER; note = 2'-O-methylguanosine-3'-phosphate
  modified_base 18: mod_base = OTHER; note = 2'-O-methylguanosine-3'-phosphate
  modified_base 19: mod_base = OTHER; note = 2'-O-methyluridine-3'-phosphate
  modified_base 20: mod_base = OTHER; note = 2'-O-methylguanosine-3'-phosphate
  modified_base 21: mod_base = OTHER; note = 2'-O-methylcytidine-3'-phosphate
  modified_base 22: mod_base = OTHER; note = 2'-O-methyluridine-3'-phosphate
  modified_base 23: mod_base = OTHER; note = 2'-O-methyladenosine
taggacaacaggcggaggtgcta

SEQ ID NO: 5001 - RNA, 23 nt, synthetic construct
  source 1..23: mol_type = other RNA
  modified_base 1: mod_base = OTHER; note = 2'-O-methyluridine-3'-phosphate 5'phosphate
  modified_base 2: mod_base = OTHER; note = 2'-deoxy-2'-fluorocytidine-3'-phosphate
  modified_base 3: mod_base = OTHER; note = 2'-O-methyladenosine-3'-phosphate
  modified_base 4: mod_base = OTHER; note = 2'-O-methylguanosine-3'-phosphate
  modified_base 5: mod_base = OTHER; note = 2'-O-methylguanosine-3'-phosphate
  modified_base 6: mod_base = OTHER; note = 2'-deoxy-2'-fluoroadenosine-3'-phosphate
  modified_base 7: mod_base = OTHER; note = 2'-O-methylcytidine-3'-phosphate
  modified_base 8: mod_base = OTHER; note = 2'-O-methyladenosine-3'-phosphate
  modified_base 9: mod_base = OTHER; note = 2'-O-methyladenosine-3'-phosphate
  modified_base 10: mod_base = OTHER; note = 2'-O-methylcytidine-3'-phosphate
  modified_base 11: mod_base = OTHER; note = 2'-O-methyladenosine-3'-phosphate
  modified_base 12: mod_base = OTHER; note = 2'-O-methylguanosine-3'-phosphate
  modified_base 13: mod_base = OTHER; note = 2'-O-methylguanosine-3'-phosphate
  modified_base 14: mod_base = OTHER; note = 2'-deoxy-2'-fluorocytidine-3'-phosphate
  modified_base 15: mod_base = OTHER; note = 2'-O-methylguanosine-3'-phosphate
  modified_base 16: mod_base = OTHER; note = 2'-deoxy-2'-fluoroguanosine-3'-phosphate
  modified_base 17: mod_base = OTHER; note = 2'-O-methyladenosine-3'-phosphate
  modified_base 18: mod_base = OTHER; note = 2'-O-methylguanosine-3'-phosphate
  modified_base 19: mod_base = OTHER; note = 2'-O-methylguanosine-3'-phosphate
  modified_base 20: mod_base = OTHER; note = 2'-O-methyluridine-3'-phosphate
  modified_base 21: mod_base = OTHER; note = 2'-O-methylguanosine-3'-phosphate
  modified_base 22: mod_base = OTHER; note = 2'-O-methylcytidine-3'-phosphate
  modified_base 23: mod_base = OTHER; note = 2'-O-methyluridine
tcaggacaacaggcggaggtgct

SEQ ID NO: 5002 - RNA, 23 nt, synthetic construct
  source 1..23: mol_type = other RNA
  modified_base 1: mod_base = OTHER; note = 2'-O-methyluridine-3'-phosphate 5'phosphate
  modified_base 2: mod_base = OTHER; note = 2'-deoxy-2'-fluoroadenosine-3'-phosphate
  modified_base 3: mod_base = OTHER; note = 2'-O-methylguanosine-3'-phosphate
  modified_base 4: mod_base = OTHER; note = 2'-O-methylcytidine-3'-phosphate
  modified_base 5: mod_base = OTHER; note = 2'-O-methyladenosine-3'-phosphate
  modified_base 6: mod_base = OTHER; note = 2'-deoxy-2'-fluoroguanosine-3'-phosphate
  modified_base 7: mod_base = OTHER; note = 2'-O-methylguanosine-3'-phosphate
  modified_base 8: mod_base = OTHER; note = 2'-O-methyladenosine-3'-phosphate
  modified_base 9: mod_base = OTHER; note = 2'-O-methylcytidine-3'-phosphate
  modified_base 10: mod_base = OTHER; note = 2'-O-methyladenosine-3'-phosphate
  modified_base 11: mod_base = OTHER; note = 2'-O-methyladenosine-3'-phosphate
  modified_base 12: mod_base = OTHER; note = 2'-O-methylcytidine-3'-phosphate
  modified_base 13: mod_base = OTHER; note = 2'-O-methyladenosine-3'-phosphate
  modified_base 14: mod_base = OTHER; note = 2'-deoxy-2'-fluoroguanosine-3'-phosphate
  modified_base 15: mod_base = OTHER; note = 2'-O-methylguanosine-3'-phosphate
  modified_base 16: mod_base = OTHER; note = 2'-deoxy-2'-fluorocytidine-3'-phosphate
  modified_base 17: mod_base = OTHER; note = 2'-O-methylguanosine-3'-phosphate
  modified_base 18: mod_base = OTHER; note = 2'-O-methylguanosine-3'-phosphate
  modified_base 19: mod_base = OTHER; note = 2'-O-methyladenosine-3'-phosphate
  modified_base 20: mod_base = OTHER; note = 2'-O-methylguanosine-3'-phosphate
  modified_base 21: mod_base = OTHER; note = 2'-O-methylguanosine-3'-phosphate
  modified_base 22: mod_base = OTHER; note = 2'-O-methyluridine-3'-phosphate
  modified_base 23: mod_base = OTHER; note = 2'-O-methylguanosine
tagcaggacaacaggcggaggtg

SEQ ID NO: 5003 - RNA, 23 nt, synthetic construct
  source 1..23: mol_type = other RNA
  modified_base 1: mod_base = OTHER; note = 2'-O-methyluridine-3'-phosphate 5'phosphate
  modified_base 2: mod_base = OTHER; note = 2'-deoxy-2'-fluoroadenosine-3'-phosphate
  modified_base 3: mod_base = OTHER; note = 2'-O-methyladenosine-3'-phosphate
  modified_base 4: mod_base = OTHER; note = 2'-O-methylguanosine-3'-phosphate
  modified_base 5: mod_base = OTHER; note = 2'-O-methylcytidine-3'-phosphate
  modified_base 6: mod_base = OTHER; note = 2'-deoxy-2'-fluoroadenosine-3'-phosphate
  modified_base 7: mod_base = OTHER; note = 2'-O-methylguanosine-3'-phosphate
  modified_base 8: mod_base = OTHER; note = 2'-O-methylguanosine-3'-phosphate
  modified_base 9: mod_base = OTHER; note = 2'-O-methyladenosine-3'-phosphate
  modified_base 10: mod_base = OTHER; note = 2'-O-methylcytidine-3'-phosphate
  modified_base 11: mod_base = OTHER; note = 2'-O-methyladenosine-3'-phosphate
  modified_base 12: mod_base = OTHER; note = 2'-O-methyladenosine-3'-phosphate
  modified_base 13: mod_base = OTHER; note = 2'-O-methylcytidine-3'-phosphate
  modified_base 14: mod_base = OTHER; note = 2'-deoxy-2'-fluoroadenosine-3'-phosphate
  modified_base 15: mod_base = OTHER; note = 2'-O-methylguanosine-3'-phosphate
  modified_base 16: mod_base = OTHER; note = 2'-deoxy-2'-fluoroguanosine-3'-phosphate
  modified_base 17: mod_base = OTHER; note = 2'-O-methylcytidine-3'-phosphate
  modified_base 18: mod_base = OTHER; note = 2'-O-methylguanosine-3'-phosphate
  modified_base 19: mod_base = OTHER; note = 2'-O-methylguanosine-3'-phosphate
  modified_base 20: mod_base = OTHER; note = 2'-O-methyladenosine-3'-phosphate
  modified_base 21: mod_base = OTHER; note = 2'-O-methylguanosine-3'-phosphate
  modified_base 22: mod_base = OTHER; note = 2'-O-methylguanosine-3'-phosphate
  modified_base 23: mod_base = OTHER; note = 2'-O-methyluridine
taagcaggacaacaggcggaggt

SEQ ID NO: 5004 - RNA, 23 nt, synthetic construct
  source 1..23: mol_type = other RNA
  modified_base 1: mod_base = OTHER; note = 2'-O-methyluridine-3'-phosphate 5'phosphate
  modified_base 2: mod_base = OTHER; note = 2'-deoxy-2'-fluoroguanosine-3'-phosphate
  modified_base 3: mod_base = OTHER; note = 2'-O-methyladenosine-3'-phosphate
  modified_base 4: mod_base = OTHER; note = 2'-O-methyladenosine-3'-phosphate
  modified_base 5: mod_base = OTHER; note = 2'-O-methylguanosine-3'-phosphate
  modified_base 6: mod_base = OTHER; note = 2'-deoxy-2'-fluorocytidine-3'-phosphate
  modified_base 7: mod_base = OTHER; note = 2'-O-methyladenosine-3'-phosphate
  modified_base 8: mod_base = OTHER; note = 2'-O-methylguanosine-3'-phosphate
  modified_base 9: mod_base = OTHER; note = 2'-O-methylguanosine-3'-phosphate
  modified_base 10: mod_base = OTHER; note = 2'-O-methyladenosine-3'-phosphate
  modified_base 11: mod_base = OTHER; note = 2'-O-methylcytidine-3'-phosphate
  modified_base 12: mod_base = OTHER; note = 2'-O-methyladenosine-3'-phosphate
  modified_base 13: mod_base = OTHER; note = 2'-O-methyladenosine-3'-phosphate
  modified_base 14: mod_base = OTHER; note = 2'-deoxy-2'-fluorocytidine-3'-phosphate
  modified_base 15: mod_base = OTHER; note = 2'-O-methyladenosine-3'-phosphate
  modified_base 16: mod_base = OTHER; note = 2'-deoxy-2'-fluoroguanosine-3'-phosphate
  modified_base 17: mod_base = OTHER; note = 2'-O-methylguanosine-3'-phosphate
  modified_base 18: mod_base = OTHER; note = 2'-O-methylcytidine-3'-phosphate
  modified_base 19: mod_base = OTHER; note = 2'-O-methylguanosine-3'-phosphate
  modified_base 20: mod_base = OTHER; note = 2'-O-methylguanosine-3'-phosphate
  modified_base 21: mod_base = OTHER; note = 2'-O-methyladenosine-3'-phosphate
  modified_base 22: mod_base = OTHER; note = 2'-O-methylguanosine-3'-phosphate
  modified_base 23: mod_base = OTHER; note = 2'-O-methylguanosine
tgaagcaggacaacaggcggagg

SEQ ID NO: 5005 - RNA, 23 nt, synthetic construct
  source 1..23: mol_type = other RNA
  modified_base 1: mod_base = OTHER; note = 2'-O-methyluridine-3'-phosphate 5'phosphate
  modified_base 2: mod_base = OTHER; note = 2'-deoxy-2'-fluoroguanosine-3'-phosphate
  modified_base 3: mod_base = OTHER; note = 2'-O-methylguanosine-3'-phosphate
  modified_base 4: mod_base = OTHER; note = 2'-O-methyladenosine-3'-phosphate
  modified_base 5: mod_base = OTHER; note = 2'-O-methyladenosine-3'-phosphate
  modified_base 6: mod_base = OTHER; note = 2'-deoxy-2'-fluoroguanosine-3'-phosphate
  modified_base 7: mod_base = OTHER; note = 2'-O-methylcytidine-3'-phosphate
  modified_base 8: mod_base = OTHER; note = 2'-O-methyladenosine-3'-phosphate
  modified_base 9: mod_base = OTHER; note = 2'-O-methylguanosine-3'-phosphate
  modified_base 10: mod_base = OTHER; note = 2'-O-methylguanosine-3'-phosphate
  modified_base 11: mod_base = OTHER; note = 2'-O-methyladenosine-3'-phosphate
  modified_base 12: mod_base = OTHER; note = 2'-O-methylcytidine-3'-phosphate
  modified_base 13: mod_base = OTHER; note = 2'-O-methyladenosine-3'-phosphate
  modified_base 14: mod_base = OTHER; note = 2'-deoxy-2'-fluoroadenosine-3'-phosphate
  modified_base 15: mod_base = OTHER; note = 2'-O-methylcytidine-3'-phosphate
  modified_base 16: mod_base = OTHER; note = 2'-deoxy-2'-fluoroadenosine-3'-phosphate
  modified_base 17: mod_base = OTHER; note = 2'-O-methylguanosine-3'-phosphate
  modified_base 18: mod_base = OTHER; note = 2'-O-methylguanosine-3'-phosphate
  modified_base 19: mod_base = OTHER; note = 2'-O-methylcytidine-3'-phosphate
  modified_base 20: mod_base = OTHER; note = 2'-O-methylguanosine-3'-phosphate
  modified_base 21: mod_base = OTHER; note = 2'-O-methylguanosine-3'-phosphate
  modified_base 22: mod_base = OTHER; note = 2'-O-methyladenosine-3'-phosphate
  modified_base 23: mod_base = OTHER; note = 2'-O-methylguanosine
tggaagcaggacaacaggcggag

SEQ ID NO: 5006 - RNA, 23 nt, synthetic construct
  source 1..23: mol_type = other RNA
  modified_base 1: mod_base = OTHER; note = 2'-O-methyluridine-3'-phosphate 5'phosphate
  modified_base 2: mod_base = OTHER; note = 2'-deoxy-2'-fluorouridine-3'-phosphate
  modified_base 3: mod_base = OTHER; note = 2'-O-methylguanosine-3'-phosphate
  modified_base 4: mod_base = OTHER; note = 2'-O-methylguanosine-3'-phosphate
  modified_base 5: mod_base = OTHER; note = 2'-O-methyladenosine-3'-phosphate
  modified_base 6: mod_base = OTHER; note = 2'-deoxy-2'-fluoroadenosine-3'-phosphate
  modified_base 7: mod_base = OTHER; note = 2'-O-methylguanosine-3'-phosphate
  modified_base 8: mod_base = OTHER; note = 2'-O-methylcytidine-3'-phosphate
  modified_base 9: mod_base = OTHER; note = 2'-O-methyladenosine-3'-phosphate
  modified_base 10: mod_base = OTHER; note = 2'-O-methylguanosine-3'-phosphate
  modified_base 11: mod_base = OTHER; note = 2'-O-methylguanosine-3'-phosphate
  modified_base 12: mod_base = OTHER; note = 2'-O-methyladenosine-3'-phosphate
  modified_base 13: mod_base = OTHER; note = 2'-O-methylcytidine-3'-phosphate
  modified_base 14: mod_base = OTHER; note = 2'-deoxy-2'-fluoroadenosine-3'-phosphate
  modified_base 15: mod_base = OTHER; note = 2'-O-methyladenosine-3'-phosphate
  modified_base 16: mod_base = OTHER; note = 2'-deoxy-2'-fluorocytidine-3'-phosphate
  modified_base 17: mod_base = OTHER; note = 2'-O-methyladenosine-3'-phosphate
  modified_base 18: mod_base = OTHER; note = 2'-O-methylguanosine-3'-phosphate
  modified_base 19: mod_base = OTHER; note = 2'-O-methylguanosine-3'-phosphate
  modified_base 20: mod_base = OTHER; note = 2'-O-methylcytidine-3'-phosphate
  modified_base 21: mod_base = OTHER; note = 2'-O-methylguanosine-3'-phosphate
  modified_base 22: mod_base = OTHER; note = 2'-O-methylguanosine-3'-phosphate
  modified_base 23: mod_base = OTHER; note = 2'-O-methyladenosine
ttggaagcaggacaacaggcgga

SEQ ID NO: 5007 - RNA, 23 nt, synthetic construct
  source 1..23: mol_type = other RNA
  modified_base 1: mod_base = OTHER; note = 2'-O-methyluridine-3'-phosphate 5'phosphate
  modified_base 2: mod_base = OTHER; note = 2'-deoxy-2'-fluoroadenosine-3'-phosphate
  modified_base 3: mod_base = OTHER; note = 2'-O-methyladenosine-3'-phosphate
  modified_base 4: mod_base = OTHER; note = 2'-O-methyladenosine-3'-phosphate
  modified_base 5: mod_base = OTHER; note = 2'-O-methylcytidine-3'-phosphate
  modified_base 6: mod_base = OTHER; note = 2'-deoxy-2'-fluoroadenosine-3'-phosphate
  modified_base 7: mod_base = OTHER; note = 2'-O-methyluridine-3'-phosphate
  modified_base 8: mod_base = OTHER; note = 2'-O-methyladenosine-3'-phosphate
  modified_base 9: mod_base = OTHER; note = 2'-O-methylcytidine-3'-phosphate
  modified_base 10: mod_base = OTHER; note = 2'-O-methyladenosine-3'-phosphate
  modified_base 11: mod_base = OTHER; note = 2'-O-methylguanosine-3'-phosphate
  modified_base 12: mod_base = OTHER; note = 2'-O-methyluridine-3'-phosphate
  modified_base 13: mod_base = OTHER; note = 2'-O-methylcytidine-3'-phosphate
  modified_base 14: mod_base = OTHER; note = 2'-deoxy-2'-fluorouridine-3'-phosphate
  modified_base 15: mod_base = OTHER; note = 2'-O-methyluridine-3'-phosphate
  modified_base 16: mod_base = OTHER; note = 2'-deoxy-2'-fluorocytidine-3'-phosphate
  modified_base 17: mod_base = OTHER; note = 2'-O-methyluridine-3'-phosphate
  modified_base 18: mod_base = OTHER; note = 2'-O-methyluridine-3'-phosphate
  modified_base 19: mod_base = OTHER; note = 2'-O-methylcytidine-3'-phosphate
  modified_base 20: mod_base = OTHER; note = 2'-O-methylguanosine-3'-phosphate
  modified_base 21: mod_base = OTHER; note = 2'-O-methylguanosine-3'-phosphate
  modified_base 22: mod_base = OTHER; note = 2'-O-methyladenosine-3'-phosphate
  modified_base 23: mod_base = OTHER; note = 2'-O-methyladenosine
taaacatacagtcttcttcggaa

SEQ ID NO: 5008 - RNA, 23 nt, synthetic construct
  source 1..23: mol_type = other RNA
  modified_base 1: mod_base = OTHER; note = 2'-O-methyluridine-3'-phosphate 5'phosphate
  modified_base 2: mod_base = OTHER; note = 2'-deoxy-2'-fluorocytidine-3'-phosphate
  modified_base 3: mod_base = OTHER; note = 2'-O-methyladenosine-3'-phosphate
  modified_base 4: mod_base = OTHER; note = 2'-O-methyladenosine-3'-phosphate
  modified_base 5: mod_base = OTHER; note = 2'-O-methyladenosine-3'-phosphate
  modified_base 6: mod_base = OTHER; note = 2'-deoxy-2'-fluorocytidine-3'-phosphate
  modified_base 7: mod_base = OTHER; note = 2'-O-methyladenosine-3'-phosphate
  modified_base 8: mod_base = OTHER; note = 2'-O-methyluridine-3'-phosphate
  modified_base 9: mod_base = OTHER; note = 2'-O-methyladenosine-3'-phosphate
  modified_base 10: mod_base = OTHER; note = 2'-O-methylcytidine-3'-phosphate
  modified_base 11: mod_base = OTHER; note = 2'-O-methyladenosine-3'-phosphate
  modified_base 12: mod_base = OTHER; note = 2'-O-methylguanosine-3'-phosphate
  modified_base 13: mod_base = OTHER; note = 2'-O-methyluridine-3'-phosphate
  modified_base 14: mod_base = OTHER; note = 2'-deoxy-2'-fluorocytidine-3'-phosphate
  modified_base 15: mod_base = OTHER; note = 2'-O-methyluridine-3'-phosphate
  modified_base 16: mod_base = OTHER; note = 2'-deoxy-2'-fluorouridine-3'-phosphate
  modified_base 17: mod_base = OTHER; note = 2'-O-methylcytidine-3'-phosphate
  modified_base 18: mod_base = OTHER; note = 2'-O-methyluridine-3'-phosphate
  modified_base 19: mod_base = OTHER; note = 2'-O-methyluridine-3'-phosphate
  modified_base 20: mod_base = OTHER; note = 2'-O-methylcytidine-3'-phosphate
  modified_base 21: mod_base = OTHER; note = 2'-O-methylguanosine-3'-phosphate
  modified_base 22: mod_base = OTHER; note = 2'-O-methylguanosine-3'-phosphate
  modified_base 23: mod_base = OTHER; note = 2'-O-methyladenosine
tcaaacatacagtcttcttcgga

SEQ ID NO: 5009 - RNA, 23 nt, synthetic construct
  source 1..23: mol_type = other RNA
  modified_base 1: mod_base = OTHER; note = 2'-O-methyluridine-3'-phosphate 5'phosphate
  modified_base 2: mod_base = OTHER; note = 2'-deoxy-2'-fluorocytidine-3'-phosphate
  modified_base 3: mod_base = OTHER; note = 2'-O-methylcytidine-3'-phosphate
  modified_base 4: mod_base = OTHER; note = 2'-O-methyladenosine-3'-phosphate
  modified_base 5: mod_base = OTHER; note = 2'-O-methyladenosine-3'-phosphate
  modified_base 6: mod_base = OTHER; note = 2'-deoxy-2'-fluoroadenosine-3'-phosphate
  modified_base 7: mod_base = OTHER; note = 2'-O-methylcytidine-3'-phosphate
  modified_base 8: mod_base = OTHER; note = 2'-O-methyladenosine-3'-phosphate
  modified_base 9: mod_base = OTHER; note = 2'-O-methyluridine-3'-phosphate
  modified_base 10: mod_base = OTHER; note = 2'-O-methyladenosine-3'-phosphate
  modified_base 11: mod_base = OTHER; note = 2'-O-methylcytidine-3'-phosphate
  modified_base 12: mod_base = OTHER; note = 2'-O-methyladenosine-3'-phosphate
  modified_base 13: mod_base = OTHER; note = 2'-O-methylguanosine-3'-phosphate
  modified_base 14: mod_base = OTHER; note = 2'-deoxy-2'-fluorouridine-3'-phosphate
  modified_base 15: mod_base = OTHER; note = 2'-O-methylcytidine-3'-phosphate
  modified_base 16: mod_base = OTHER; note = 2'-deoxy-2'-fluorouridine-3'-phosphate
  modified_base 17: mod_base = OTHER; note = 2'-O-methyluridine-3'-phosphate
  modified_base 18: mod_base = OTHER; note = 2'-O-methylcytidine-3'-phosphate
  modified_base 19: mod_base = OTHER; note = 2'-O-methyluridine-3'-phosphate
  modified_base 20: mod_base = OTHER; note = 2'-O-methyluridine-3'-phosphate
  modified_base 21: mod_base = OTHER; note = 2'-O-methylcytidine-3'-phosphate
  modified_base 22: mod_base = OTHER; note = 2'-O-methylguanosine-3'-phosphate
  modified_base 23: mod_base = OTHER; note = 2'-O-methylguanosine
tccaaacatacagtcttcttcgg

SEQ ID NO: 5010 - RNA, 23 nt, synthetic construct
  source 1..23: mol_type = other RNA
  modified_base 1: mod_base = OTHER; note = 2'-O-methyluridine-3'-phosphate 5'phosphate
  modified_base 2: mod_base = OTHER; note = 2'-deoxy-2'-fluorocytidine-3'-phosphate
  modified_base 3: mod_base = OTHER; note = 2'-O-methylcytidine-3'-phosphate
  modified_base 4: mod_base = OTHER; note = 2'-O-methylcytidine-3'-phosphate
  modified_base 5: mod_base = OTHER; note = 2'-O-methyladenosine-3'-phosphate
  modified_base 6: mod_base = OTHER; note = 2'-deoxy-2'-fluoroadenosine-3'-phosphate
  modified_base 7: mod_base = OTHER; note = 2'-O-methyladenosine-3'-phosphate
  modified_base 8: mod_base = OTHER; note = 2'-O-methylcytidine-3'-phosphate
  modified_base 9: mod_base = OTHER; note = 2'-O-methyladenosine-3'-phosphate
  modified_base 10: mod_base = OTHER; note = 2'-O-methyluridine-3'-phosphate
  modified_base 11: mod_base = OTHER; note = 2'-O-methyladenosine-3'-phosphate
  modified_base 12: mod_base = OTHER; note = 2'-O-methylcytidine-3'-phosphate
  modified_base 13: mod_base = OTHER; note = 2'-O-methyladenosine-3'-phosphate
  modified_base 14: mod_base = OTHER; note = 2'-deoxy-2'-fluoroguanosine-3'-phosphate
  modified_base 15: mod_base = OTHER; note = 2'-O-methyluridine-3'-phosphate
  modified_base 16: mod_base = OTHER; note = 2'-deoxy-2'-fluorocytidine-3'-phosphate
  modified_base 17: mod_base = OTHER; note = 2'-O-methyluridine-3'-phosphate
  modified_base 18: mod_base = OTHER; note = 2'-O-methyluridine-3'-phosphate
  modified_base 19: mod_base = OTHER; note = 2'-O-methylcytidine-3'-phosphate
  modified_base 20: mod_base = OTHER; note = 2'-O-methyluridine-3'-phosphate
  modified_base 21: mod_base = OTHER; note = 2'-O-methyluridine-3'-phosphate
  modified_base 22: mod_base = OTHER; note = 2'-O-methylcytidine-3'-phosphate
  modified_base 23: mod_base = OTHER; note = 2'-O-methylguanosine
tcccaaacatacagtcttcttcg

SEQ ID NO: 5011 - RNA, 23 nt, synthetic construct
  source 1..23: mol_type = other RNA
  modified_base 1: mod_base = OTHER; note = 2'-O-methyluridine-3'-phosphate 5'phosphate
  modified_base 2: mod_base = OTHER; note = 2'-deoxy-2'-fluoroguanosine-3'-phosphate
  modified_base 3: mod_base = OTHER; note = 2'-O-methyluridine-3'-phosphate
  modified_base 4: mod_base = OTHER; note = 2'-O-methylcytidine-3'-phosphate
  modified_base 5: mod_base = OTHER; note = 2'-O-methylcytidine-3'-phosphate
  modified_base 6: mod_base = OTHER; note = 2'-deoxy-2'-fluorocytidine-3'-phosphate
  modified_base 7: mod_base = OTHER; note = 2'-O-methyladenosine-3'-phosphate
  modified_base 8: mod_base = OTHER; note = 2'-O-methylguanosine-3'-phosphate
  modified_base 9: mod_base = OTHER; note = 2'-O-methyluridine-3'-phosphate
  modified_base 10: mod_base = OTHER; note = 2'-O-methyladenosine-3'-phosphate
  modified_base 11: mod_base = OTHER; note = 2'-O-methyladenosine-3'-phosphate
  modified_base 12: mod_base = OTHER; note = 2'-O-methylcytidine-3'-phosphate
  modified_base 13: mod_base = OTHER; note = 2'-O-methyladenosine-3'-phosphate
  modified_base 14: mod_base = OTHER; note = 2'-deoxy-2'-fluoroguanosine-3'-phosphate
  modified_base 15: mod_base = OTHER; note = 2'-O-methyluridine-3'-phosphate
  modified_base 16: mod_base = OTHER; note = 2'-deoxy-2'-fluoroguanosine-3'-phosphate
  modified_base 17: mod_base = OTHER; note = 2'-O-methylguanosine-3'-phosphate
  modified_base 18: mod_base = OTHER; note = 2'-O-methyluridine-3'-phosphate
  modified_base 19: mod_base = OTHER; note = 2'-O-methylcytidine-3'-phosphate
  modified_base 20: mod_base = OTHER; note = 2'-O-methylguanosine-3'-phosphate
  modified_base 21: mod_base = OTHER; note = 2'-O-methylcytidine-3'-phosphate
  modified_base 22: mod_base = OTHER; note = 2'-O-methylcytidine-3'-phosphate
  modified_base 23: mod_base = OTHER; note = 2'-O-methylcytidine
tgtcccagtaacagtggtcgccc

SEQ ID NO: 5012 - RNA, 23 nt, synthetic construct
  source 1..23: mol_type = other RNA
  modified_base 1: mod_base = OTHER; note = 2'-O-methyluridine-3'-phosphate 5'phosphate
  modified_base 2: mod_base = OTHER; note = 2'-deoxy-2'-fluoroguanosine-3'-phosphate
  modified_base 3: mod_base = OTHER; note = 2'-O-methyluridine-3'-phosphate
  modified_base 4: mod_base = OTHER; note = 2'-O-methylcytidine-3'-phosphate
  modified_base 5: mod_base = OTHER; note = 2'-O-methylcytidine-3'-phosphate
  modified_base 6: mod_base = OTHER; note = 2'-deoxy-2'-fluorouridine-3'-phosphate
  modified_base 7: mod_base = OTHER; note = 2'-O-methylguanosine-3'-phosphate
  modified_base 8: mod_base = OTHER; note = 2'-O-methylguanosine-3'-phosphate
  modified_base 9: mod_base = OTHER; note = 2'-O-methylcytidine-3'-phosphate
  modified_base 10: mod_base = OTHER; note = 2'-O-methyladenosine-3'-phosphate
  modified_base 11: mod_base = OTHER; note = 2'-O-methyluridine-3'-phosphate
  modified_base 12: mod_base = OTHER; note = 2'-O-methylguanosine-3'-phosphate
  modified_base 13: mod_base = OTHER; note = 2'-O-methylguanosine-3'-phosphate
  modified_base 14: mod_base = OTHER; note = 2'-deoxy-2'-fluorocytidine-3'-phosphate
  modified_base 15: mod_base = OTHER; note = 2'-O-methylguanosine-3'-phosphate
  modified_base 16: mod_base = OTHER; note = 2'-deoxy-2'-fluorouridine-3'-phosphate
  modified_base 17: mod_base = OTHER; note = 2'-O-methylcytidine-3'-phosphate
  modified_base 18: mod_base = OTHER; note = 2'-O-methylcytidine-3'-phosphate
  modified_base 19: mod_base = OTHER; note = 2'-O-methylcytidine-3'-phosphate
  modified_base 20: mod_base = OTHER; note = 2'-O-methyladenosine-3'-phosphate
  modified_base 21: mod_base = OTHER; note = 2'-O-methylguanosine-3'-phosphate
  modified_base 22: mod_base = OTHER; note = 2'-O-methyluridine-3'-phosphate
  modified_base 23: mod_base = OTHER; note = 2'-O-methyladenosine
tgtcctggcatggcgtcccagta

SEQ ID NO: 5013 - RNA, 23 nt, synthetic construct
  source 1..23: mol_type = other RNA
  modified_base 1: mod_base = OTHER; note = 2'-O-methyluridine-3'-phosphate 5'phosphate
  modified_base 2: mod_base = OTHER; note = 2'-deoxy-2'-fluoroadenosine-3'-phosphate
  modified_base 3: mod_base = OTHER; note = 2'-O-methylguanosine-3'-phosphate
  modified_base 4: mod_base = OTHER; note = 2'-O-methyluridine-3'-phosphate
  modified_base 5: mod_base = OTHER; note = 2'-O-methylcytidine-3'-phosphate
  modified_base 6: mod_base = OTHER; note = 2'-deoxy-2'-fluorocytidine-3'-phosphate
  modified_base 7: mod_base = OTHER; note = 2'-O-methyluridine-3'-phosphate
  modified_base 8: mod_base = OTHER; note = 2'-O-methylguanosine-3'-phosphate
  modified_base 9: mod_base = OTHER; note = 2'-O-methylguanosine-3'-phosphate
  modified_base 10: mod_base = OTHER; note = 2'-O-methylcytidine-3'-phosphate
  modified_base 11: mod_base = OTHER; note = 2'-O-methyladenosine-3'-phosphate
  modified_base 12: mod_base = OTHER; note = 2'-O-methyluridine-3'-phosphate
  modified_base 13: mod_base = OTHER; note = 2'-O-methylguanosine-3'-phosphate
  modified_base 14: mod_base = OTHER; note = 2'-deoxy-2'-fluoroguanosine-3'-phosphate
  modified_base 15: mod_base = OTHER; note = 2'-O-methylcytidine-3'-phosphate
  modified_base 16: mod_base = OTHER; note = 2'-deoxy-2'-fluoroguanosine-3'-phosphate
  modified_base 17: mod_base = OTHER; note = 2'-O-methyluridine-3'-phosphate
  modified_base 18: mod_base = OTHER; note = 2'-O-methylcytidine-3'-phosphate
  modified_base 19: mod_base = OTHER; note = 2'-O-methylcytidine-3'-phosphate
  modified_base 20: mod_base = OTHER; note = 2'-O-methylcytidine-3'-phosphate
  modified_base 21: mod_base = OTHER; note = 2'-O-methyladenosine-3'-phosphate
  modified_base 22: mod_base = OTHER; note = 2'-O-methylguanosine-3'-phosphate
  modified_base 23: mod_base = OTHER; note = 2'-O-methyluridine
tagtcctggcatggcgtcccagt

SEQ ID NO: 5014 - RNA, 23 nt, synthetic construct
  source 1..23: mol_type = other RNA
  modified_base 1: mod_base = OTHER; note = 2'-O-methyluridine-3'-phosphate 5'phosphate
  modified_base 2: mod_base = OTHER; note = 2'-deoxy-2'-fluoroguanosine-3'-phosphate
  modified_base 3: mod_base = OTHER; note = 2'-O-methyluridine-3'-phosphate
  modified_base 4: mod_base = OTHER; note = 2'-O-methylguanosine-3'-phosphate
  modified_base 5: mod_base = OTHER; note = 2'-O-methyladenosine-3'-phosphate
  modified_base 6: mod_base = OTHER; note = 2'-deoxy-2'-fluoroadenosine-3'-phosphate
  modified_base 7: mod_base = OTHER; note = 2'-O-methyladenosine-3'-phosphate
  modified_base 8: mod_base = OTHER; note = 2'-O-methyladenosine-3'-phosphate
  modified_base 9: mod_base = OTHER; note = 2'-O-methyluridine-3'-phosphate
  modified_base 10: mod_base = OTHER; note = 2'-O-methylguanosine-3'-phosphate
  modified_base 11: mod_base = OTHER; note = 2'-O-methylcytidine-3'-phosphate
  modified_base 12: mod_base = OTHER; note = 2'-O-methyluridine-3'-phosphate
  modified_base 13: mod_base = OTHER; note = 2'-O-methylguanosine-3'-phosphate
  modified_base 14: mod_base = OTHER; note = 2'-deoxy-2'-fluorouridine-3'-phosphate
  modified_base 15: mod_base = OTHER; note = 2'-O-methylguanosine-3'-phosphate
  modified_base 16: mod_base = OTHER; note = 2'-deoxy-2'-fluorouridine-3'-phosphate
  modified_base 17: mod_base = OTHER; note = 2'-O-methylcytidine-3'-phosphate
  modified_base 18: mod_base = OTHER; note = 2'-O-methyluridine-3'-phosphate
  modified_base 19: mod_base = OTHER; note = 2'-O-methyladenosine-3'-phosphate
  modified_base 20: mod_base = OTHER; note = 2'-O-methyluridine-3'-phosphate
  modified_base 21: mod_base = OTHER; note = 2'-O-methylguanosine-3'-phosphate
  modified_base 22: mod_base = OTHER; note = 2'-O-methylguanosine-3'-phosphate
  modified_base 23: mod_base = OTHER; note = 2'-O-methylguanosine
tgtgaaaatgctgtgtctatggg

SEQ ID NO: 5015 - RNA, 23 nt, synthetic construct
  source 1..23: mol_type = other RNA
  modified_base 1: mod_base = OTHER; note = 2'-O-methyluridine-3'-phosphate 5'phosphate
  modified_base 2: mod_base = OTHER; note = 2'-deoxy-2'-fluoroadenosine-3'-phosphate
  modified_base 3: mod_base = OTHER; note = 2'-O-methylguanosine-3'-phosphate
  modified_base 4: mod_base = OTHER; note = 2'-O-methyluridine-3'-phosphate
  modified_base 5: mod_base = OTHER; note = 2'-O-methylguanosine-3'-phosphate
  modified_base 6: mod_base = OTHER; note = 2'-deoxy-2'-fluoroadenosine-3'-phosphate
  modified_base 7: mod_base = OTHER; note = 2'-O-methyladenosine-3'-phosphate
  modified_base 8: mod_base = OTHER; note = 2'-O-methyladenosine-3'-phosphate
  modified_base 9: mod_base = OTHER; note = 2'-O-methyladenosine-3'-phosphate
  modified_base 10: mod_base = OTHER; note = 2'-O-methyluridine-3'-phosphate
  modified_base 11: mod_base = OTHER; note = 2'-O-methylguanosine-3'-phosphate
  modified_base 12: mod_base = OTHER; note = 2'-O-methylcytidine-3'-phosphate
  modified_base 13: mod_base = OTHER; note = 2'-O-methyluridine-3'-phosphate
  modified_base 14: mod_base = OTHER; note = 2'-deoxy-2'-fluoroguanosine-3'-phosphate
  modified_base 15: mod_base = OTHER; note = 2'-O-methyluridine-3'-phosphate
  modified_base 16: mod_base = OTHER; note = 2'-deoxy-2'-fluoroguanosine-3'-phosphate
  modified_base 17: mod_base = OTHER; note = 2'-O-methyluridine-3'-phosphate
  modified_base 18: mod_base = OTHER; note = 2'-O-methylcytidine-3'-phosphate
  modified_base 19: mod_base = OTHER; note = 2'-O-methyluridine-3'-phosphate
  modified_base 20: mod_base = OTHER; note = 2'-O-methyladenosine-3'-phosphate
  modified_base 21: mod_base = OTHER; note = 2'-O-methyluridine-3'-phosphate
  modified_base 22: mod_base = OTHER; note = 2'-O-methylguanosine-3'-phosphate
  modified_base 23: mod_base = OTHER; note = 2'-O-methylguanosine
tagtgaaaatgctgtgtctatgg

SEQ ID NO: 5016 - RNA, 23 nt, synthetic construct
  source 1..23: mol_type = other RNA
  modified_base 1: mod_base = OTHER; note = 2'-O-methyluridine-3'-phosphate 5'phosphate
  modified_base 2: mod_base = OTHER; note = 2'-deoxy-2'-fluoroguanosine-3'-phosphate
  modified_base 3: mod_base = OTHER; note = 2'-O-methyladenosine-3'-phosphate
  modified_base 4: mod_base = OTHER; note = 2'-O-methylguanosine-3'-phosphate
  modified_base 5: mod_base = OTHER; note = 2'-O-methyluridine-3'-phosphate
  modified_base 6: mod_base = OTHER; note = 2'-deoxy-2'-fluoroguanosine-3'-phosphate
  modified_base 7: mod_base = OTHER; note = 2'-O-methyladenosine-3'-phosphate
  modified_base 8: mod_base = OTHER; note = 2'-O-methyladenosine-3'-phosphate
  modified_base 9: mod_base = OTHER; note = 2'-O-methyladenosine-3'-phosphate
  modified_base 10: mod_base = OTHER; note = 2'-O-methyladenosine-3'-phosphate
  modified_base 11: mod_base = OTHER; note = 2'-O-methyluridine-3'-phosphate
  modified_base 12: mod_base = OTHER; note = 2'-O-methylguanosine-3'-phosphate
  modified_base 13: mod_base = OTHER; note = 2'-O-methylcytidine-3'-phosphate
  modified_base 14: mod_base = OTHER; note = 2'-deoxy-2'-fluorouridine-3'-phosphate
  modified_base 15: mod_base = OTHER; note = 2'-O-methylguanosine-3'-phosphate
  modified_base 16: mod_base = OTHER; note = 2'-deoxy-2'-fluorouridine-3'-phosphate
  modified_base 17: mod_base = OTHER; note = 2'-O-methylguanosine-3'-phosphate
  modified_base 18: mod_base = OTHER; note = 2'-O-methyluridine-3'-phosphate
  modified_base 19: mod_base = OTHER; note = 2'-O-methylcytidine-3'-phosphate
  modified_base 20: mod_base = OTHER; note = 2'-O-methyluridine-3'-phosphate
  modified_base 21: mod_base = OTHER; note = 2'-O-methyladenosine-3'-phosphate
  modified_base 22: mod_base = OTHER; note = 2'-O-methyluridine-3'-phosphate
  modified_base 23: mod_base = OTHER; note = 2'-O-methylguanosine
tgagtgaaaatgctgtgtctatg

SEQ ID NO: 5017 - RNA, 23 nt, synthetic construct
  source 1..23: mol_type = other RNA
  modified_base 1: mod_base = OTHER; note = 2'-O-methyluridine-3'-phosphate 5'phosphate
  modified_base 2: mod_base = OTHER; note = 2'-deoxy-2'-fluoroguanosine-3'-phosphate
  modified_base 3: mod_base = OTHER; note = 2'-O-methylguanosine-3'-phosphate
  modified_base 4: mod_base = OTHER; note = 2'-O-methyladenosine-3'-phosphate
  modified_base 5: mod_base = OTHER; note = 2'-O-methylguanosine-3'-phosphate
  modified_base 6: mod_base = OTHER; note = 2'-deoxy-2'-fluorouridine-3'-phosphate
  modified_base 7: mod_base = OTHER; note = 2'-O-methylguanosine-3'-phosphate
  modified_base 8: mod_base = OTHER; note = 2'-O-methyladenosine-3'-phosphate
  modified_base 9: mod_base = OTHER; note = 2'-O-methyladenosine-3'-phosphate
  modified_base 10: mod_base = OTHER; note = 2'-O-methyladenosine-3'-phosphate
  modified_base 11: mod_base = OTHER; note = 2'-O-methyladenosine-3'-phosphate
  modified_base 12: mod_base = OTHER; note = 2'-O-methyluridine-3'-phosphate
  modified_base 13: mod_base = OTHER; note = 2'-O-methylguanosine-3'-phosphate
  modified_base 14: mod_base = OTHER; note = 2'-deoxy-2'-fluorocytidine-3'-phosphate
  modified_base 15: mod_base = OTHER; note = 2'-O-methyluridine-3'-phosphate
  modified_base 16: mod_base = OTHER; note = 2'-deoxy-2'-fluoroguanosine-3'-phosphate
  modified_base 17: mod_base = OTHER; note = 2'-O-methyluridine-3'-phosphate
  modified_base 18: mod_base = OTHER; note = 2'-O-methylguanosine-3'-phosphate
  modified_base 19: mod_base = OTHER; note = 2'-O-methyluridine-3'-phosphate
  modified_base 20: mod_base = OTHER; note = 2'-O-methylcytidine-3'-phosphate
  modified_base 21: mod_base = OTHER; note = 2'-O-methyluridine-3'-phosphate
  modified_base 22: mod_base = OTHER; note = 2'-O-methyladenosine-3'-phosphate
  modified_base 23: mod_base = OTHER; note = 2'-O-methyluridine
tggagtgaaaatgctgtgtctat

SEQ ID NO: 5018 - RNA, 23 nt, synthetic construct
  source 1..23: mol_type = other RNA
  modified_base 1: mod_base = OTHER; note = 2'-O-methyluridine-3'-phosphate 5'phosphate
  modified_base 2: mod_base = OTHER; note = 2'-deoxy-2'-fluorouridine-3'-phosphate
  modified_base 3: mod_base = OTHER; note = 2'-O-methylguanosine-3'-phosphate
  modified_base 4: mod_base = OTHER; note = 2'-O-methylguanosine-3'-phosphate
  modified_base 5: mod_base = OTHER; note = 2'-O-methyladenosine-3'-phosphate
  modified_base 6: mod_base = OTHER; note = 2'-deoxy-2'-fluoroguanosine-3'-phosphate
  modified_base 7: mod_base = OTHER; note = 2'-O-methyluridine-3'-phosphate
  modified_base 8: mod_base = OTHER; note = 2'-O-methylguanosine-3'-phosphate
  modified_base 9: mod_base = OTHER; note = 2'-O-methyladenosine-3'-phosphate
  modified_base 10: mod_base = OTHER; note = 2'-O-methyladenosine-3'-phosphate
  modified_base 11: mod_base = OTHER; note = 2'-O-methyladenosine-3'-phosphate
  modified_base 12: mod_base = OTHER; note = 2'-O-methyladenosine-3'-phosphate
  modified_base 13: mod_base = OTHER; note = 2'-O-methyluridine-3'-phosphate
  modified_base 14: mod_base = OTHER; note = 2'-deoxy-2'-fluoroguanosine-3'-phosphate
  modified_base 15: mod_base = OTHER; note = 2'-O-methylcytidine-3'-phosphate
  modified_base 16: mod_base = OTHER; note = 2'-deoxy-2'-fluorouridine-3'-phosphate
  modified_base 17: mod_base = OTHER; note = 2'-O-methylguanosine-3'-phosphate
  modified_base 18: mod_base = OTHER; note = 2'-O-methyluridine-3'-phosphate
  modified_base 19: mod_base = OTHER; note = 2'-O-methylguanosine-3'-phosphate
  modified_base 20: mod_base = OTHER; note = 2'-O-methyluridine-3'-phosphate
  modified_base 21: mod_base = OTHER; note = 2'-O-methylcytidine-3'-phosphate
  modified_base 22: mod_base = OTHER; note = 2'-O-methyluridine-3'-phosphate
  modified_base 23: mod_base = OTHER; note = 2'-O-methyladenosine
ttggagtgaaaatgctgtgtcta

SEQ ID NO: 5019 - RNA, 23 nt, synthetic construct
  source 1..23: mol_type = other RNA
  modified_base 1: mod_base = OTHER; note = 2'-O-methyluridine-3'-phosphate 5'phosphate
  modified_base 2: mod_base = OTHER; note = 2'-deoxy-2'-fluorocytidine-3'-phosphate
  modified_base 3: mod_base = OTHER; note = 2'-O-methyluridine-3'-phosphate
  modified_base 4: mod_base = OTHER; note = 2'-O-methylguanosine-3'-phosphate
  modified_base 5: mod_base = OTHER; note = 2'-O-methylguanosine-3'-phosphate
  modified_base 6: mod_base = OTHER; note = 2'-deoxy-2'-fluoroadenosine-3'-phosphate
  modified_base 7: mod_base = OTHER; note = 2'-O-methylguanosine-3'-phosphate
  modified_base 8: mod_base = OTHER; note = 2'-O-methyluridine-3'-phosphate
  modified_base 9: mod_base = OTHER; note = 2'-O-methylguanosine-3'-phosphate
  modified_base 10: mod_base = OTHER; note = 2'-O-methyladenosine-3'-phosphate
  modified_base 11: mod_base = OTHER; note = 2'-O-methyladenosine-3'-phosphate
  modified_base 12: mod_base = OTHER; note = 2'-O-methyladenosine-3'-phosphate
  modified_base 13: mod_base = OTHER; note = 2'-O-methyladenosine-3'-phosphate
  modified_base 14: mod_base = OTHER; note = 2'-deoxy-2'-fluorouridine-3'-phosphate
  modified_base 15: mod_base = OTHER; note = 2'-O-methylguanosine-3'-phosphate
  modified_base 16: mod_base = OTHER; note = 2'-deoxy-2'-fluorocytidine-3'-phosphate
  modified_base 17: mod_base = OTHER; note = 2'-O-methyluridine-3'-phosphate
  modified_base 18: mod_base = OTHER; note = 2'-O-methylguanosine-3'-phosphate
  modified_base 19: mod_base = OTHER; note = 2'-O-methyluridine-3'-phosphate
  modified_base 20: mod_base = OTHER; note = 2'-O-methylguanosine-3'-phosphate
  modified_base 21: mod_base = OTHER; note = 2'-O-methyluridine-3'-phosphate
  modified_base 22: mod_base = OTHER; note = 2'-O-methylcytidine-3'-phosphate
  modified_base 23: mod_base = OTHER; note = 2'-O-methyluridine
tctggagtgaaaatgctgtgtct

SEQ ID NO: 5020 - RNA, 23 nt, synthetic construct
  source 1..23: mol_type = other RNA
  modified_base 1: mod_base = OTHER; note = 2'-O-methyluridine-3'-phosphate 5'phosphate
  modified_base 2: mod_base = OTHER; note = 2'-deoxy-2'-fluorouridine-3'-phosphate
  modified_base 3: mod_base = OTHER; note = 2'-O-methylcytidine-3'-phosphate
  modified_base 4: mod_base = OTHER; note = 2'-O-methyluridine-3'-phosphate
  modified_base 5: mod_base = OTHER; note = 2'-O-methylguanosine-3'-phosphate
  modified_base 6: mod_base = OTHER; note = 2'-deoxy-2'-fluoroguanosine-3'-phosphate
  modified_base 7: mod_base = OTHER; note = 2'-O-methyladenosine-3'-phosphate
  modified_base 8: mod_base = OTHER; note = 2'-O-methylguanosine-3'-phosphate
  modified_base 9: mod_base = OTHER; note = 2'-O-methyluridine-3'-phosphate
  modified_base 10: mod_base = OTHER; note = 2'-O-methylguanosine-3'-phosphate
  modified_base 11: mod_base = OTHER; note = 2'-O-methyladenosine-3'-phosphate
  modified_base 12: mod_base = OTHER; note = 2'-O-methyladenosine-3'-phosphate
  modified_base 13: mod_base = OTHER; note = 2'-O-methyladenosine-3'-phosphate
  modified_base 14: mod_base = OTHER; note = 2'-deoxy-2'-fluoroadenosine-3'-phosphate
  modified_base 15: mod_base = OTHER; note = 2'-O-methyluridine-3'-phosphate
  modified_base 16: mod_base = OTHER; note = 2'-deoxy-2'-fluoroguanosine-3'-phosphate
  modified_base 17: mod_base = OTHER; note = 2'-O-methylcytidine-3'-phosphate
  modified_base 18: mod_base = OTHER; note = 2'-O-methyluridine-3'-phosphate
  modified_base 19: mod_base = OTHER; note = 2'-O-methylguanosine-3'-phosphate
  modified_base 20: mod_base = OTHER; note = 2'-O-methyluridine-3'-phosphate
  modified_base 21: mod_base = OTHER; note = 2'-O-methylguanosine-3'-phosphate
  modified_base 22: mod_base = OTHER; note = 2'-O-methyluridine-3'-phosphate
  modified_base 23: mod_base = OTHER; note = 2'-O-methylcytidine
ttctggagtgaaaatgctgtgtc

SEQ ID NO: 5021 - RNA, 23 nt, synthetic construct
  source 1..23: mol_type = other RNA
  modified_base 1: mod_base = OTHER; note = 2'-O-methyluridine-3'-phosphate 5'phosphate
  modified_base 2: mod_base = OTHER; note = 2'-deoxy-2'-fluorocytidine-3'-phosphate
  modified_base 3: mod_base = OTHER; note = 2'-O-methyluridine-3'-phosphate
  modified_base 4: mod_base = OTHER; note = 2'-O-methylcytidine-3'-phosphate
  modified_base 5: mod_base = OTHER; note = 2'-O-methyluridine-3'-phosphate
  modified_base 6: mod_base = OTHER; note = 2'-deoxy-2'-fluoroguanosine-3'-phosphate
  modified_base 7: mod_base = OTHER; note = 2'-O-methylguanosine-3'-phosphate
  modified_base 8: mod_base = OTHER; note = 2'-O-methyladenosine-3'-phosphate
  modified_base 9: mod_base = OTHER; note = 2'-O-methylguanosine-3'-phosphate
  modified_base 10: mod_base = OTHER; note = 2'-O-methyluridine-3'-phosphate
  modified_base 11: mod_base = OTHER; note = 2'-O-methylguanosine-3'-phosphate
  modified_base 12: mod_base = OTHER; note = 2'-O-methyladenosine-3'-phosphate
  modified_base 13: mod_base = OTHER; note = 2'-O-methyladenosine-3'-phosphate
  modified_base 14: mod_base = OTHER; note = 2'-deoxy-2'-fluoroadenosine-3'-phosphate
  modified_base 15: mod_base = OTHER; note = 2'-O-methyladenosine-3'-phosphate
  modified_base 16: mod_base = OTHER; note = 2'-deoxy-2'-fluorouridine-3'-phosphate
  modified_base 17: mod_base = OTHER; note = 2'-O-methylguanosine-3'-phosphate
  modified_base 18: mod_base = OTHER; note = 2'-O-methylcytidine-3'-phosphate
  modified_base 19: mod_base = OTHER; note = 2'-O-methyluridine-3'-phosphate
  modified_base 20: mod_base = OTHER; note = 2'-O-methylguanosine-3'-phosphate
  modified_base 21: mod_base = OTHER; note = 2'-O-methyluridine-3'-phosphate
  modified_base 22: mod_base = OTHER; note = 2'-O-methylguanosine-3'-phosphate
  modified_base 23: mod_base = OTHER; note = 2'-O-methyluridine
tctctggagtgaaaatgctgtgt

SEQ ID NO: 5022 - RNA, 23 nt, synthetic construct
  source 1..23: mol_type = other RNA
  modified_base 1: mod_base = OTHER; note = 2'-O-methyluridine-3'-phosphate 5'phosphate
  modified_base 2: mod_base = OTHER; note = 2'-deoxy-2'-fluorouridine-3'-phosphate
  modified_base 3: mod_base = OTHER; note = 2'-O-methylcytidine-3'-phosphate
  modified_base 4: mod_base = OTHER; note = 2'-O-methyluridine-3'-phosphate
  modified_base 5: mod_base = OTHER; note = 2'-O-methylcytidine-3'-phosphate
  modified_base 6: mod_base = OTHER; note = 2'-deoxy-2'-fluorouridine-3'-phosphate
  modified_base 7: mod_base = OTHER; note = 2'-O-methylguanosine-3'-phosphate
  modified_base 8: mod_base = OTHER; note = 2'-O-methylguanosine-3'-phosphate
  modified_base 9: mod_base = OTHER; note = 2'-O-methyladenosine-3'-phosphate
  modified_base 10: mod_base = OTHER; note = 2'-O-methylguanosine-3'-phosphate
  modified_base 11: mod_base = OTHER; note = 2'-O-methyluridine-3'-phosphate
  modified_base 12: mod_base = OTHER; note = 2'-O-methylguanosine-3'-phosphate
  modified_base 13: mod_base = OTHER; note = 2'-O-methyladenosine-3'-phosphate
  modified_base 14: mod_base = OTHER; note = 2'-deoxy-2'-fluoroadenosine-3'-phosphate
  modified_base 15: mod_base = OTHER; note = 2'-O-methyladenosine-3'-phosphate
  modified_base 16: mod_base = OTHER; note = 2'-deoxy-2'-fluoroadenosine-3'-phosphate
  modified_base 17: mod_base = OTHER; note = 2'-O-methyluridine-3'-phosphate
  modified_base 18: mod_base = OTHER; note = 2'-O-methylguanosine-3'-phosphate
  modified_base 19: mod_base = OTHER; note = 2'-O-methylcytidine-3'-phosphate
  modified_base 20: mod_base = OTHER; note = 2'-O-methyluridine-3'-phosphate
  modified_base 21: mod_base = OTHER; note = 2'-O-methylguanosine-3'-phosphate
  modified_base 22: mod_base = OTHER; note = 2'-O-methyluridine-3'-phosphate
  modified_base 23: mod_base = OTHER; note = 2'-O-methylguanosine
ttctctggagtgaaaatgctgtg

SEQ ID NO: 5023 - RNA, 23 nt, synthetic construct
  source 1..23: mol_type = other RNA
  modified_base 1: mod_base = OTHER; note = 2'-O-methyluridine-3'-phosphate 5'phosphate
  modified_base 2: mod_base = OTHER; note = 2'-deoxy-2'-fluoroguanosine-3'-phosphate
  modified_base 3: mod_base = OTHER; note = 2'-O-methyluridine-3'-phosphate
  modified_base 4: mod_base = OTHER; note = 2'-O-methylcytidine-3'-phosphate
  modified_base 5: mod_base = OTHER; note = 2'-O-methyluridine-3'-phosphate
  modified_base 6: mod_base = OTHER; note = 2'-deoxy-2'-fluorocytidine-3'-phosphate
  modified_base 7: mod_base = OTHER; note = 2'-O-methyluridine-3'-phosphate
  modified_base 8: mod_base = OTHER; note = 2'-O-methylguanosine-3'-phosphate
  modified_base 9: mod_base = OTHER; note = 2'-O-methylguanosine-3'-phosphate
  modified_base 10: mod_base = OTHER; note = 2'-O-methyladenosine-3'-phosphate
  modified_base 11: mod_base = OTHER; note = 2'-O-methylguanosine-3'-phosphate
  modified_base 12: mod_base = OTHER; note = 2'-O-methyluridine-3'-phosphate
  modified_base 13: mod_base = OTHER; note = 2'-O-methylguanosine-3'-phosphate
  modified_base 14: mod_base = OTHER; note = 2'-deoxy-2'-fluoroadenosine-3'-phosphate
  modified_base 15: mod_base = OTHER; note = 2'-O-methyladenosine-3'-phosphate
  modified_base 16: mod_base = OTHER; note = 2'-deoxy-2'-fluoroadenosine-3'-phosphate
  modified_base 17: mod_base = OTHER; note = 2'-O-methyladenosine-3'-phosphate
  modified_base 18: mod_base = OTHER; note = 2'-O-methyluridine-3'-phosphate
  modified_base 19: mod_base = OTHER; note = 2'-O-methylguanosine-3'-phosphate
  modified_base 20: mod_base = OTHER; note = 2'-O-methylcytidine-3'-phosphate
  modified_base 21: mod_base = OTHER; note = 2'-O-methyluridine-3'-phosphate
  modified_base 22: mod_base = OTHER; note = 2'-O-methylguanosine-3'-phosphate
  modified_base 23: mod_base = OTHER; note = 2'-O-methyluridine
tgtctctggagtgaaaatgctgt

SEQ ID NO: 5024 - RNA, 23 nt, synthetic construct
  source 1..23: mol_type = other RNA
  modified_base 1: mod_base = OTHER; note = 2'-O-methyluridine-3'-phosphate 5'phosphate
  modified_base 2: mod_base = OTHER; note = 2'-deoxy-2'-fluorouridine-3'-phosphate
  modified_base 3: mod_base = OTHER; note = 2'-O-methylguanosine-3'-phosphate
  modified_base 4: mod_base = OTHER; note = 2'-O-methyluridine-3'-phosphate
  modified_base 5: mod_base = OTHER; note = 2'-O-methylcytidine-3'-phosphate
  modified_base 6: mod_base = OTHER; note = 2'-deoxy-2'-fluorouridine-3'-phosphate
  modified_base 7: mod_base = OTHER; note = 2'-O-methylcytidine-3'-phosphate
  modified_base 8: mod_base = OTHER; note = 2'-O-methyluridine-3'-phosphate
  modified_base 9: mod_base = OTHER; note = 2'-O-methylguanosine-3'-phosphate
  modified_base 10: mod_base = OTHER; note = 2'-O-methylguanosine-3'-phosphate
  modified_base 11: mod_base = OTHER; note = 2'-O-methyladenosine-3'-phosphate
  modified_base 12: mod_base = OTHER; note = 2'-O-methylguanosine-3'-phosphate
  modified_base 13: mod_base = OTHER; note = 2'-O-methyluridine-3'-phosphate
  modified_base 14: mod_base = OTHER; note = 2'-deoxy-2'-fluoroguanosine-3'-phosphate
  modified_base 15: mod_base = OTHER; note = 2'-O-methyladenosine-3'-phosphate
  modified_base 16: mod_base = OTHER; note = 2'-deoxy-2'-fluoroadenosine-3'-phosphate
  modified_base 17: mod_base = OTHER; note = 2'-O-methyladenosine-3'-phosphate
  modified_base 18: mod_base = OTHER; note = 2'-O-methyladenosine-3'-phosphate
  modified_base 19: mod_base = OTHER; note = 2'-O-methyluridine-3'-phosphate
  modified_base 20: mod_base = OTHER; note = 2'-O-methylguanosine-3'-phosphate
  modified_base 21: mod_base = OTHER; note = 2'-O-methylcytidine-3'-phosphate
  modified_base 22: mod_base = OTHER; note = 2'-O-methyluridine-3'-phosphate
  modified_base 23: mod_base = OTHER; note = 2'-O-methylguanosine
ttgtctctggagtgaaaatgctg

SEQ ID NO: 5025 - RNA, 23 nt, synthetic construct
  source 1..23: mol_type = other RNA
  modified_base 1: mod_base = OTHER; note = 2'-O-methyluridine-3'-phosphate 5'phosphate
  modified_base 2: mod_base = OTHER; note = 2'-deoxy-2'-fluorouridine-3'-phosphate
  modified_base 3: mod_base = OTHER; note = 2'-O-methyluridine-3'-phosphate
  modified_base 4: mod_base = OTHER; note = 2'-O-methylguanosine-3'-phosphate
  modified_base 5: mod_base = OTHER; note = 2'-O-methyluridine-3'-phosphate
  modified_base 6: mod_base = OTHER; note = 2'-deoxy-2'-fluorocytidine-3'-phosphate
  modified_base 7: mod_base = OTHER; note = 2'-O-methyluridine-3'-phosphate
  modified_base 8: mod_base = OTHER; note = 2'-O-methylcytidine-3'-phosphate
  modified_base 9: mod_base = OTHER; note = 2'-O-methyluridine-3'-phosphate
  modified_base 10: mod_base = OTHER; note = 2'-O-methylguanosine-3'-phosphate
  modified_base 11: mod_base = OTHER; note = 2'-O-methylguanosine-3'-phosphate
  modified_base 12: mod_base = OTHER; note = 2'-O-methyladenosine-3'-phosphate
  modified_base 13: mod_base = OTHER; note = 2'-O-methylguanosine-3'-phosphate
  modified_base 14: mod_base = OTHER; note = 2'-deoxy-2'-fluorouridine-3'-phosphate
  modified_base 15: mod_base = OTHER; note = 2'-O-methylguanosine-3'-phosphate
  modified_base 16: mod_base = OTHER; note = 2'-deoxy-2'-fluoroadenosine-3'-phosphate
  modified_base 17: mod_base = OTHER; note = 2'-O-methyladenosine-3'-phosphate
  modified_base 18: mod_base = OTHER; note = 2'-O-methyladenosine-3'-phosphate
  modified_base 19: mod_base = OTHER; note = 2'-O-methyladenosine-3'-phosphate
  modified_base 20: mod_base = OTHER; note = 2'-O-methyluridine-3'-phosphate
  modified_base 21: mod_base = OTHER; note = 2'-O-methylguanosine-3'-phosphate
  modified_base 22: mod_base = OTHER; note = 2'-O-methylcytidine-3'-phosphate
  modified_base 23: mod_base = OTHER; note = 2'-O-methyluridine
tttgtctctggagtgaaaatgct

SEQ ID NO: 5026 - RNA, 23 nt, synthetic construct
  source 1..23: mol_type = other RNA
  modified_base 1: mod_base = OTHER; note = 2'-O-methyluridine-3'-phosphate 5'phosphate
  modified_base 2: mod_base = OTHER; note = 2'-deoxy-2'-fluorouridine-3'-phosphate
  modified_base 3: mod_base = OTHER; note = 2'-O-methyluridine-3'-phosphate
  modified_base 4: mod_base = OTHER; note = 2'-O-methyluridine-3'-phosphate
  modified_base 5: mod_base = OTHER; note = 2'-O-methylguanosine-3'-phosphate
  modified_base 6: mod_base = OTHER; note = 2'-deoxy-2'-fluorouridine-3'-phosphate
  modified_base 7: mod_base = OTHER; note = 2'-O-methylcytidine-3'-phosphate
  modified_base 8: mod_base = OTHER; note = 2'-O-methyluridine-3'-phosphate
  modified_base 9: mod_base = OTHER; note = 2'-O-methylcytidine-3'-phosphate
  modified_base 10: mod_base = OTHER; note = 2'-O-methyluridine-3'-phosphate
  modified_base 11: mod_base = OTHER; note = 2'-O-methylguanosine-3'-phosphate
  modified_base 12: mod_base = OTHER; note = 2'-O-methylguanosine-3'-phosphate
  modified_base 13: mod_base = OTHER; note = 2'-O-methyladenosine-3'-phosphate
  modified_base 14: mod_base = OTHER; note = 2'-deoxy-2'-fluoroguanosine-3'-phosphate
  modified_base 15: mod_base = OTHER; note = 2'-O-methyluridine-3'-phosphate
  modified_base 16: mod_base = OTHER; note = 2'-deoxy-2'-fluoroguanosine-3'-phosphate
  modified_base 17: mod_base = OTHER; note = 2'-O-methyladenosine-3'-phosphate
  modified_base 18: mod_base = OTHER; note = 2'-O-methyladenosine-3'-phosphate
  modified_base 19: mod_base = OTHER; note = 2'-O-methyladenosine-3'-phosphate
  modified_base 20: mod_base = OTHER; note = 2'-O-methyladenosine-3'-phosphate
  modified_base 21: mod_base = OTHER; note = 2'-O-methyluridine-3'-phosphate
  modified_base 22: mod_base = OTHER; note = 2'-O-methylguanosine-3'-phosphate
  modified_base 23: mod_base = OTHER; note = 2'-O-methylcytidine
ttttgtctctggagtgaaaatgc

SEQ ID NO: 5027 - RNA, 23 nt, synthetic construct
  source 1..23: mol_type = other RNA
  modified_base 1: mod_base = OTHER; note = 2'-O-methyluridine-3'-phosphate 5'phosphate
  modified_base 2: mod_base = OTHER; note = 2'-deoxy-2'-fluoroadenosine-3'-phosphate
  modified_base 3: mod_base = OTHER; note = 2'-O-methyluridine-3'-phosphate
  modified_base 4: mod_base = OTHER; note = 2'-O-methyluridine-3'-phosphate
  modified_base 5: mod_base = OTHER; note = 2'-O-methyluridine-3'-phosphate
  modified_base 6: mod_base = OTHER; note = 2'-deoxy-2'-fluoroguanosine-3'-phosphate
  modified_base 7: mod_base = OTHER; note = 2'-O-methyluridine-3'-phosphate
  modified_base 8: mod_base = OTHER; note = 2'-O-methylcytidine-3'-phosphate
  modified_base 9: mod_base = OTHER; note = 2'-O-methyluridine-3'-phosphate
  modified_base 10: mod_base = OTHER; note = 2'-O-methylcytidine-3'-phosphate
  modified_base 11: mod_base = OTHER; note = 2'-O-methyluridine-3'-phosphate
  modified_base 12: mod_base = OTHER; note = 2'-O-methylguanosine-3'-phosphate
  modified_base 13: mod_base = OTHER; note = 2'-O-methylguanosine-3'-phosphate
  modified_base 14: mod_base = OTHER; note = 2'-deoxy-2'-fluoroadenosine-3'-phosphate
  modified_base 15: mod_base = OTHER; note = 2'-O-methylguanosine-3'-phosphate
  modified_base 16: mod_base = OTHER; note = 2'-deoxy-2'-fluorouridine-3'-phosphate
  modified_base 17: mod_base = OTHER; note = 2'-O-methylguanosine-3'-phosphate
  modified_base 18: mod_base = OTHER; note = 2'-O-methyladenosine-3'-phosphate
  modified_base 19: mod_base = OTHER; note = 2'-O-methyladenosine-3'-phosphate
  modified_base 20: mod_base = OTHER; note = 2'-O-methyladenosine-3'-phosphate
  modified_base 21: mod_base = OTHER; note = 2'-O-methyladenosine-3'-phosphate
  modified_base 22: mod_base = OTHER; note = 2'-O-methyluridine-3'-phosphate
  modified_base 23: mod_base = OTHER; note = 2'-O-methylguanosine
tatttgtctctggagtgaaaatg

SEQ ID NO: 5028 - RNA, 23 nt, synthetic construct
  source 1..23: mol_type = other RNA
  modified_base 1: mod_base = OTHER; note = 2'-O-methyluridine-3'-phosphate 5'phosphate
  modified_base 2: mod_base = OTHER; note = 2'-deoxy-2'-fluoroguanosine-3'-phosphate
  modified_base 3: mod_base = OTHER; note = 2'-O-methyladenosine-3'-phosphate
  modified_base 4: mod_base = OTHER; note = 2'-O-methyluridine-3'-phosphate
  modified_base 5: mod_base = OTHER; note = 2'-O-methyluridine-3'-phosphate
  modified_base 6: mod_base = OTHER; note = 2'-deoxy-2'-fluorouridine-3'-phosphate
  modified_base 7: mod_base = OTHER; note = 2'-O-methylguanosine-3'-phosphate
  modified_base 8: mod_base = OTHER; note = 2'-O-methyluridine-3'-phosphate
  modified_base 9: mod_base = OTHER; note = 2'-O-methylcytidine-3'-phosphate
  modified_base 10: mod_base = OTHER; note = 2'-O-methyluridine-3'-phosphate
  modified_base 11: mod_base = OTHER; note = 2'-O-methylcytidine-3'-phosphate
  modified_base 12: mod_base = OTHER; note = 2'-O-methyluridine-3'-phosphate
  modified_base 13: mod_base = OTHER; note = 2'-O-methylguanosine-3'-phosphate
  modified_base 14: mod_base = OTHER; note = 2'-deoxy-2'-fluoroguanosine-3'-phosphate
  modified_base 15: mod_base = OTHER; note = 2'-O-methyladenosine-3'-phosphate
  modified_base 16: mod_base = OTHER; note = 2'-deoxy-2'-fluoroguanosine-3'-phosphate
  modified_base 17: mod_base = OTHER; note = 2'-O-methyluridine-3'-phosphate
  modified_base 18: mod_base = OTHER; note = 2'-O-methylguanosine-3'-phosphate
  modified_base 19: mod_base = OTHER; note = 2'-O-methyladenosine-3'-phosphate
  modified_base 20: mod_base = OTHER; note = 2'-O-methyladenosine-3'-phosphate
  modified_base 21: mod_base = OTHER; note = 2'-O-methyladenosine-3'-phosphate
  modified_base 22: mod_base = OTHER; note = 2'-O-methyladenosine-3'-phosphate
  modified_base 23: mod_base = OTHER; note = 2'-O-methyluridine
tgatttgtctctggagtgaaaat

SEQ ID NO: 5029 - RNA, 23 nt, synthetic construct
  source 1..23: mol_type = other RNA
  modified_base 1: mod_base = OTHER; note = 2'-O-methyluridine-3'-phosphate 5'phosphate
  modified_base 2: mod_base = OTHER; note = 2'-deoxy-2'-fluoroguanosine-3'-phosphate
  modified_base 3: mod_base = OTHER; note = 2'-O-methylguanosine-3'-phosphate
  modified_base 4: mod_base = OTHER; note = 2'-O-methyladenosine-3'-phosphate
  modified_base 5: mod_base = OTHER; note = 2'-O-methyluridine-3'-phosphate
  modified_base 6: mod_base = OTHER; note = 2'-deoxy-2'-fluorouridine-3'-phosphate
  modified_base 7: mod_base = OTHER; note = 2'-O-methyluridine-3'-phosphate
  modified_base 8: mod_base = OTHER; note = 2'-O-methylguanosine-3'-phosphate
  modified_base 9: mod_base = OTHER; note = 2'-O-methyluridine-3'-phosphate
  modified_base 10: mod_base = OTHER; note = 2'-O-methylcytidine-3'-phosphate
  modified_base 11: mod_base = OTHER; note = 2'-O-methyluridine-3'-phosphate
  modified_base 12: mod_base = OTHER; note = 2'-O-methylcytidine-3'-phosphate
  modified_base 13: mod_base = OTHER; note = 2'-O-methyluridine-3'-phosphate
  modified_base 14: mod_base = OTHER; note = 2'-deoxy-2'-fluoroguanosine-3'-phosphate
  modified_base 15: mod_base = OTHER; note = 2'-O-methylguanosine-3'-phosphate
  modified_base 16: mod_base = OTHER; note = 2'-deoxy-2'-fluoroadenosine-3'-phosphate
  modified_base 17: mod_base = OTHER; note = 2'-O-methylguanosine-3'-phosphate
  modified_base 18: mod_base = OTHER; note = 2'-O-methyluridine-3'-phosphate
  modified_base 19: mod_base = OTHER; note = 2'-O-methylguanosine-3'-phosphate
  modified_base 20: mod_base = OTHER; note = 2'-O-methyladenosine-3'-phosphate
  modified_base 21: mod_base = OTHER; note = 2'-O-methyladenosine-3'-phosphate
  modified_base 22: mod_base = OTHER; note = 2'-O-methyladenosine-3'-phosphate
  modified_base 23: mod_base = OTHER; note = 2'-O-methyladenosine
tggatttgtctctggagtgaaaa

SEQ ID NO: 5030 - RNA, 23 nt, synthetic construct
  source 1..23: mol_type = other RNA
  modified_base 1: mod_base = OTHER; note = 2'-O-methyluridine-3'-phosphate 5'phosphate
  modified_base 2: mod_base = OTHER; note = 2'-deoxy-2'-fluorouridine-3'-phosphate
  modified_base 3: mod_base = OTHER; note = 2'-O-methylguanosine-3'-phosphate
  modified_base 4: mod_base = OTHER; note = 2'-O-methylguanosine-3'-phosphate
  modified_base 5: mod_base = OTHER; note = 2'-O-methyladenosine-3'-phosphate
  modified_base 6: mod_base = OTHER; note = 2'-deoxy-2'-fluorouridine-3'-phosphate
  modified_base 7: mod_base = OTHER; note = 2'-O-methyluridine-3'-phosphate
  modified_base 8: mod_base = OTHER; note = 2'-O-methyluridine-3'-phosphate
  modified_base 9: mod_base = OTHER; note = 2'-O-methylguanosine-3'-phosphate
  modified_base 10: mod_base = OTHER; note = 2'-O-methyluridine-3'-phosphate
  modified_base 11: mod_base = OTHER; note = 2'-O-methylcytidine-3'-phosphate
  modified_base 12: mod_base = OTHER; note = 2'-O-methyluridine-3'-phosphate
  modified_base 13: mod_base = OTHER; note = 2'-O-methylcytidine-3'-phosphate
  modified_base 14: mod_base = OTHER; note = 2'-deoxy-2'-fluorouridine-3'-phosphate
  modified_base 15: mod_base = OTHER; note = 2'-O-methylguanosine-3'-phosphate
  modified_base 16: mod_base = OTHER; note = 2'-deoxy-2'-fluoroguanosine-3'-phosphate
  modified_base 17: mod_base = OTHER; note = 2'-O-methyladenosine-3'-phosphate
  modified_base 18: mod_base = OTHER; note = 2'-O-methylguanosine-3'-phosphate
  modified_base 19: mod_base = OTHER; note = 2'-O-methyluridine-3'-phosphate
  modified_base 20: mod_base = OTHER; note = 2'-O-methylguanosine-3'-phosphate
  modified_base 21: mod_base = OTHER; note = 2'-O-methyladenosine-3'-phosphate
  modified_base 22: mod_base = OTHER; note = 2'-O-methyladenosine-3'-phosphate
  modified_base 23: mod_base = OTHER; note = 2'-O-methyladenosine
ttggatttgtctctggagtgaaa

SEQ ID NO: 5031 - RNA, 23 nt, synthetic construct
  source 1..23: mol_type = other RNA
  modified_base 1: mod_base = OTHER; note = 2'-O-methyluridine-3'-phosphate 5'phosphate
  modified_base 2: mod_base = OTHER; note = 2'-deoxy-2'-fluorouridine-3'-phosphate
  modified_base 3: mod_base = OTHER; note = 2'-O-methyluridine-3'-phosphate
  modified_base 4: mod_base = OTHER; note = 2'-O-methyluridine-3'-phosphate
  modified_base 5: mod_base = OTHER; note = 2'-O-methyluridine-3'-phosphate
  modified_base 6: mod_base = OTHER; note = 2'-deoxy-2'-fluorouridine-3'-phosphate
  modified_base 7: mod_base = OTHER; note = 2'-O-methyluridine-3'-phosphate
  modified_base 8: mod_base = OTHER; note = 2'-O-methylcytidine-3'-phosphate
  modified_base 9: mod_base = OTHER; note = 2'-O-methylcytidine-3'-phosphate
  modified_base 10: mod_base = OTHER; note = 2'-O-methyladenosine-3'-phosphate
  modified_base 11: mod_base = OTHER; note = 2'-O-methylguanosine-3'-phosphate
  modified_base 12: mod_base = OTHER; note = 2'-O-methyladenosine-3'-phosphate
  modified_base 13: mod_base = OTHER; note = 2'-O-methylcytidine-3'-phosphate
  modified_base 14: mod_base = OTHER; note = 2'-deoxy-2'-fluorocytidine-3'-phosphate
  modified_base 15: mod_base = OTHER; note = 2'-O-methylcytidine-3'-phosphate
  modified_base 16: mod_base = OTHER; note = 2'-deoxy-2'-fluoroguanosine-3'-phosphate
  modified_base 17: mod_base = OTHER; note = 2'-O-methylcytidine-3'-phosphate
  modified_base 18: mod_base = OTHER; note = 2'-O-methylcytidine-3'-phosphate
  modified_base 19: mod_base = OTHER; note = 2'-O-methylcytidine-3'-phosphate
  modified_base 20: mod_base = OTHER; note = 2'-O-methylguanosine-3'-phosphate
  modified_base 21: mod_base = OTHER; note = 2'-O-methyluridine-3'-phosphate
  modified_base 22: mod_base = OTHER; note = 2'-O-methylguanosine-3'-phosphate
  modified_base 23: mod_base = OTHER; note = 2'-O-methylguanosine
tttttttccagacccgcccgtgg

SEQ ID NO: 5032 - RNA, 23 nt, synthetic construct
  source 1..23: mol_type = other RNA
  modified_base 1: mod_base = OTHER; note = 2'-O-methyluridine-3'-phosphate 5'phosphate
  modified_base 2: mod_base = OTHER; note = 2'-deoxy-2'-fluorouridine-3'-phosphate
  modified_base 3: mod_base = OTHER; note = 2'-O-methyluridine-3'-phosphate
  modified_base 4: mod_base = OTHER; note = 2'-O-methyluridine-3'-phosphate
  modified_base 5: mod_base = OTHER; note = 2'-O-methyluridine-3'-phosphate
  modified_base 6: mod_base = OTHER; note = 2'-deoxy-2'-fluorouridine-3'-phosphate
  modified_base 7: mod_base = OTHER; note = 2'-O-methyluridine-3'-phosphate
  modified_base 8: mod_base = OTHER; note = 2'-O-methyluridine-3'-phosphate
  modified_base 9: mod_base = OTHER; note = 2'-O-methylcytidine-3'-phosphate
  modified_base 10: mod_base = OTHER; note = 2'-O-methylcytidine-3'-phosphate
  modified_base 11: mod_base = OTHER; note = 2'-O-methyladenosine-3'-phosphate
  modified_base 12: mod_base = OTHER; note = 2'-O-methylguanosine-3'-phosphate
  modified_base 13: mod_base = OTHER; note = 2'-O-methyladenosine-3'-phosphate
  modified_base 14: mod_base = OTHER; note = 2'-deoxy-2'-fluorocytidine-3'-phosphate
  modified_base 15: mod_base = OTHER; note = 2'-O-methylcytidine-3'-phosphate
  modified_base 16: mod_base = OTHER; note = 2'-deoxy-2'-fluorocytidine-3'-phosphate
  modified_base 17: mod_base = OTHER; note = 2'-O-methylguanosine-3'-phosphate
  modified_base 18: mod_base = OTHER; note = 2'-O-methylcytidine-3'-phosphate
  modified_base 19: mod_base = OTHER; note = 2'-O-methylcytidine-3'-phosphate
  modified_base 20: mod_base = OTHER; note = 2'-O-methylcytidine-3'-phosphate
  modified_base 21: mod_base = OTHER; note = 2'-O-methylguanosine-3'-phosphate
  modified_base 22: mod_base = OTHER; note = 2'-O-methyluridine-3'-phosphate
  modified_base 23: mod_base = OTHER; note = 2'-O-methylguanosine
ttttttttccagacccgcccgtg

SEQ ID NO: 5033 - RNA, 23 nt, synthetic construct
  source 1..23: mol_type = other RNA
  modified_base 1: mod_base = OTHER; note = 2'-O-methyluridine-3'-phosphate 5'phosphate
  modified_base 2: mod_base = OTHER; note = 2'-deoxy-2'-fluoroadenosine-3'-phosphate
  modified_base 3: mod_base = OTHER; note = 2'-O-methyluridine-3'-phosphate
  modified_base 4: mod_base = OTHER; note = 2'-O-methyluridine-3'-phosphate
  modified_base 5: mod_base = OTHER; note = 2'-O-methyluridine-3'-phosphate
  modified_base 6: mod_base = OTHER; note = 2'-deoxy-2'-fluorouridine-3'-phosphate
  modified_base 7: mod_base = OTHER; note = 2'-O-methyluridine-3'-phosphate
  modified_base 8: mod_base = OTHER; note = 2'-O-methyluridine-3'-phosphate
  modified_base 9: mod_base = OTHER; note = 2'-O-methyluridine-3'-phosphate
  modified_base 10: mod_base = OTHER; note = 2'-O-methylcytidine-3'-phosphate
  modified_base 11: mod_base = OTHER; note = 2'-O-methylcytidine-3'-phosphate
  modified_base 12: mod_base = OTHER; note = 2'-O-methyladenosine-3'-phosphate
  modified_base 13: mod_base = OTHER; note = 2'-O-methylguanosine-3'-phosphate
  modified_base 14: mod_base = OTHER; note = 2'-deoxy-2'-fluoroadenosine-3'-phosphate
  modified_base 15: mod_base = OTHER; note = 2'-O-methylcytidine-3'-phosphate
  modified_base 16: mod_base = OTHER; note = 2'-deoxy-2'-fluorocytidine-3'-phosphate
  modified_base 17: mod_base = OTHER; note = 2'-O-methylcytidine-3'-phosphate
  modified_base 18: mod_base = OTHER; note = 2'-O-methylguanosine-3'-phosphate
  modified_base 19: mod_base = OTHER; note = 2'-O-methylcytidine-3'-phosphate
  modified_base 20: mod_base = OTHER; note = 2'-O-methylcytidine-3'-phosphate
  modified_base 21: mod_base = OTHER; note = 2'-O-methylcytidine-3'-phosphate
  modified_base 22: mod_base = OTHER; note = 2'-O-methylguanosine-3'-phosphate
  modified_base 23: mod_base = OTHER; note = 2'-O-methyluridine
tatttttttccagacccgcccgt

SEQ ID NO: 5034 - RNA, 23 nt, synthetic construct
  source 1..23: mol_type = other RNA
  modified_base 1: mod_base = OTHER; note = 2'-O-methyluridine-3'-phosphate 5'phosphate
  modified_base 2: mod_base = OTHER; note = 2'-deoxy-2'-fluoroadenosine-3'-phosphate
  modified_base 3: mod_base = OTHER; note = 2'-O-methyladenosine-3'-phosphate
  modified_base 4: mod_base = OTHER; note = 2'-O-methyluridine-3'-phosphate
  modified_base 5: mod_base = OTHER; note = 2'-O-methyluridine-3'-phosphate
  modified_base 6: mod_base = OTHER; note = 2'-deoxy-2'-fluorouridine-3'-phosphate
  modified_base 7: mod_base = OTHER; note = 2'-O-methyluridine-3'-phosphate
  modified_base 8: mod_base = OTHER; note = 2'-O-methyluridine-3'-phosphate
  modified_base 9: mod_base = OTHER; note = 2'-O-methyluridine-3'-phosphate
  modified_base 10: mod_base = OTHER; note = 2'-O-methyluridine-3'-phosphate
  modified_base 11: mod_base = OTHER; note = 2'-O-methylcytidine-3'-phosphate
  modified_base 12: mod_base = OTHER; note = 2'-O-methylcytidine-3'-phosphate
  modified_base 13: mod_base = OTHER; note = 2'-O-methyladenosine-3'-phosphate
  modified_base 14: mod_base = OTHER; note = 2'-deoxy-2'-fluoroguanosine-3'-phosphate
  modified_base 15: mod_base = OTHER; note = 2'-O-methyladenosine-3'-phosphate
  modified_base 16: mod_base = OTHER; note = 2'-deoxy-2'-fluorocytidine-3'-phosphate
  modified_base 17: mod_base = OTHER; note = 2'-O-methylcytidine-3'-phosphate
  modified_base 18: mod_base = OTHER; note = 2'-O-methylcytidine-3'-phosphate
  modified_base 19: mod_base = OTHER; note = 2'-O-methylguanosine-3'-phosphate
  modified_base 20: mod_base = OTHER; note = 2'-O-methylcytidine-3'-phosphate
  modified_base 21: mod_base = OTHER; note = 2'-O-methylcytidine-3'-phosphate
  modified_base 22: mod_base = OTHER; note = 2'-O-methylcytidine-3'-phosphate
  modified_base 23: mod_base = OTHER; note = 2'-O-methylguanosine
taatttttttccagacccgcccg

SEQ ID NO: 5035 - RNA, 23 nt, synthetic construct
  source 1..23: mol_type = other RNA
  modified_base 1: mod_base = OTHER; note = 2'-O-methyluridine-3'-phosphate 5'phosphate
  modified_base 2: mod_base = OTHER; note = 2'-deoxy-2'-fluorouridine-3'-phosphate
  modified_base 3: mod_base = OTHER; note = 2'-O-methyladenosine-3'-phosphate
  modified_base 4: mod_base = OTHER; note = 2'-O-methyladenosine-3'-phosphate
  modified_base 5: mod_base = OTHER; note = 2'-O-methyluridine-3'-phosphate
  modified_base 6: mod_base = OTHER; note = 2'-deoxy-2'-fluorouridine-3'-phosphate
  modified_base 7: mod_base = OTHER; note = 2'-O-methyluridine-3'-phosphate
  modified_base 8: mod_base = OTHER; note = 2'-O-methyluridine-3'-phosphate
  modified_base 9: mod_base = OTHER; note = 2'-O-methyluridine-3'-phosphate
  modified_base 10: mod_base = OTHER; note = 2'-O-methyluridine-3'-phosphate
  modified_base 11: mod_base = OTHER; note = 2'-O-methyluridine-3'-phosphate
  modified_base 12: mod_base = OTHER; note = 2'-O-methylcytidine-3'-phosphate
  modified_base 13: mod_base = OTHER; note = 2'-O-methylcytidine-3'-phosphate
  modified_base 14: mod_base = OTHER; note = 2'-deoxy-2'-fluoroadenosine-3'-phosphate
  modified_base 15: mod_base = OTHER; note = 2'-O-methylguanosine-3'-phosphate
  modified_base 16: mod_base = OTHER; note = 2'-deoxy-2'-fluoroadenosine-3'-phosphate
  modified_base 17: mod_base = OTHER; note = 2'-O-methylcytidine-3'-phosphate
  modified_base 18: mod_base = OTHER; note = 2'-O-methylcytidine-3'-phosphate
  modified_base 19: mod_base = OTHER; note = 2'-O-methylcytidine-3'-phosphate
  modified_base 20: mod_base = OTHER; note = 2'-O-methylguanosine-3'-phosphate
  modified_base 21: mod_base = OTHER; note = 2'-O-methylcytidine-3'-phosphate
  modified_base 22: mod_base = OTHER; note = 2'-O-methylcytidine-3'-phosphate
  modified_base 23: mod_base = OTHER; note = 2'-O-methylcytidine
ttaatttttttccagacccgccc

SEQ ID NO: 5036 - RNA, 23 nt, synthetic construct
  source 1..23: mol_type = other RNA
  modified_base 1: mod_base = OTHER; note = 2'-O-methyluridine-3'-phosphate 5'phosphate
  modified_base 2: mod_base = OTHER; note = 2'-deoxy-2'-fluoroguanosine-3'-phosphate
  modified_base 3: mod_base = OTHER; note = 2'-O-methyluridine-3'-phosphate
  modified_base 4: mod_base = OTHER; note = 2'-O-methyladenosine-3'-phosphate
  modified_base 5: mod_base = OTHER; note = 2'-O-methyladenosine-3'-phosphate
  modified_base 6: mod_base = OTHER; note = 2'-deoxy-2'-fluorouridine-3'-phosphate
  modified_base 7: mod_base = OTHER; note = 2'-O-methyluridine-3'-phosphate
  modified_base 8: mod_base = OTHER; note = 2'-O-methyluridine-3'-phosphate
  modified_base 9: mod_base = OTHER; note = 2'-O-methyluridine-3'-phosphate
  modified_base 10: mod_base = OTHER; note = 2'-O-methyluridine-3'-phosphate
  modified_base 11: mod_base = OTHER; note = 2'-O-methyluridine-3'-phosphate
  modified_base 12: mod_base = OTHER; note = 2'-O-methyluridine-3'-phosphate
  modified_base 13: mod_base = OTHER; note = 2'-O-methylcytidine-3'-phosphate
  modified_base 14: mod_base = OTHER; note = 2'-deoxy-2'-fluorocytidine-3'-phosphate
  modified_base 15: mod_base = OTHER; note = 2'-O-methyladenosine-3'-phosphate
  modified_base 16: mod_base = OTHER; note = 2'-deoxy-2'-fluoroguanosine-3'-phosphate
  modified_base 17: mod_base = OTHER; note = 2'-O-methyladenosine-3'-phosphate
  modified_base 18: mod_base = OTHER; note = 2'-O-methylcytidine-3'-phosphate
  modified_base 19: mod_base = OTHER; note = 2'-O-methylcytidine-3'-phosphate
  modified_base 20: mod_base = OTHER; note = 2'-O-methylcytidine-3'-phosphate
  modified_base 21: mod_base = OTHER; note = 2'-O-methylguanosine-3'-phosphate
  modified_base 22: mod_base = OTHER; note = 2'-O-methylcytidine-3'-phosphate
  modified_base 23: mod_base = OTHER; note = 2'-O-methylcytidine
tgtaatttttttccagacccgcc

SEQ ID NO: 5037 - RNA, 23 nt, synthetic construct
  source 1..23: mol_type = other RNA
  modified_base 1: mod_base = OTHER; note = 2'-O-methyluridine-3'-phosphate 5'phosphate
  modified_base 2: mod_base = OTHER; note = 2'-deoxy-2'-fluoroadenosine-3'-phosphate
  modified_base 3: mod_base = OTHER; note = 2'-O-methylguanosine-3'-phosphate
  modified_base 4: mod_base = OTHER; note = 2'-O-methyluridine-3'-phosphate
  modified_base 5: mod_base = OTHER; note = 2'-O-methyladenosine-3'-phosphate
  modified_base 6: mod_base = OTHER; note = 2'-deoxy-2'-fluoroadenosine-3'-phosphate
  modified_base 7: mod_base = OTHER; note = 2'-O-methyluridine-3'-phosphate
  modified_base 8: mod_base = OTHER; note = 2'-O-methyluridine-3'-phosphate
  modified_base 9: mod_base = OTHER; note = 2'-O-methyluridine-3'-phosphate
  modified_base 10: mod_base = OTHER; note = 2'-O-methyluridine-3'-phosphate
  modified_base 11: mod_base = OTHER; note = 2'-O-methyluridine-3'-phosphate
  modified_base 12: mod_base = OTHER; note = 2'-O-methyluridine-3'-phosphate
  modified_base 13: mod_base = OTHER; note = 2'-O-methyluridine-3'-phosphate
  modified_base 14: mod_base = OTHER; note = 2'-deoxy-2'-fluorocytidine-3'-phosphate
  modified_base 15: mod_base = OTHER; note = 2'-O-methylcytidine-3'-phosphate
  modified_base 16: mod_base = OTHER; note = 2'-deoxy-2'-fluoroadenosine-3'-phosphate
  modified_base 17: mod_base = OTHER; note = 2'-O-methylguanosine-3'-phosphate
  modified_base 18: mod_base = OTHER; note = 2'-O-methyladenosine-3'-phosphate
  modified_base 19: mod_base = OTHER; note = 2'-O-methylcytidine-3'-phosphate
  modified_base 20: mod_base = OTHER; note = 2'-O-methylcytidine-3'-phosphate
  modified_base 21: mod_base = OTHER; note = 2'-O-methylcytidine-3'-phosphate
  modified_base 22: mod_base = OTHER; note = 2'-O-methylguanosine-3'-phosphate
  modified_base 23: mod_base = OTHER; note = 2'-O-methylcytidine
tagtaatttttttccagacccgc

SEQ ID NO: 5038 - RNA, 23 nt, synthetic construct
  source 1..23: mol_type = other RNA
  modified_base 1: mod_base = OTHER; note = 2'-O-methyluridine-3'-phosphate 5'phosphate
  modified_base 2: mod_base = OTHER; note = 2'-deoxy-2'-fluorocytidine-3'-phosphate
  modified_base 3: mod_base = OTHER; note = 2'-O-methyladenosine-3'-phosphate
  modified_base 4: mod_base = OTHER; note = 2'-O-methylguanosine-3'-phosphate
  modified_base 5: mod_base = OTHER; note = 2'-O-methyluridine-3'-phosphate
  modified_base 6: mod_base = OTHER; note = 2'-deoxy-2'-fluoroadenosine-3'-phosphate
  modified_base 7: mod_base = OTHER; note = 2'-O-methyladenosine-3'-phosphate
  modified_base 8: mod_base = OTHER; note = 2'-O-methyluridine-3'-phosphate
  modified_base 9: mod_base = OTHER; note = 2'-O-methyluridine-3'-phosphate
  modified_base 10: mod_base = OTHER; note = 2'-O-methyluridine-3'-phosphate
  modified_base 11: mod_base = OTHER; note = 2'-O-methyluridine-3'-phosphate
  modified_base 12: mod_base = OTHER; note = 2'-O-methyluridine-3'-phosphate
  modified_base 13: mod_base = OTHER; note = 2'-O-methyluridine-3'-phosphate
  modified_base 14: mod_base = OTHER; note = 2'-deoxy-2'-fluorouridine-3'-phosphate
  modified_base 15: mod_base = OTHER; note = 2'-O-methylcytidine-3'-phosphate
  modified_base 16: mod_base = OTHER; note = 2'-deoxy-2'-fluorocytidine-3'-phosphate
  modified_base 17: mod_base = OTHER; note = 2'-O-methyladenosine-3'-phosphate
  modified_base 18: mod_base = OTHER; note = 2'-O-methylguanosine-3'-phosphate
  modified_base 19: mod_base = OTHER; note = 2'-O-methyladenosine-3'-phosphate
  modified_base 20: mod_base = OTHER; note = 2'-O-methylcytidine-3'-phosphate
  modified_base 21: mod_base = OTHER; note = 2'-O-methylcytidine-3'-phosphate
  modified_base 22: mod_base = OTHER; note = 2'-O-methylcytidine-3'-phosphate
  modified_base 23: mod_base = OTHER; note = 2'-O-methylguanosine
tcagtaatttttttccagacccg

SEQ ID NO: 5039 - RNA, 23 nt, synthetic construct
  source 1..23: mol_type = other RNA
  modified_base 1: mod_base = OTHER; note = 2'-O-methyluridine-3'-phosphate 5'phosphate
  modified_base 2: mod_base = OTHER; note = 2'-deoxy-2'-fluoroguanosine-3'-phosphate
  modified_base 3: mod_base = OTHER; note = 2'-O-methylcytidine-3'-phosphate
  modified_base 4: mod_base = OTHER; note = 2'-O-methyladenosine-3'-phosphate
  modified_base 5: mod_base = OTHER; note = 2'-O-methylguanosine-3'-phosphate
  modified_base 6: mod_base = OTHER; note = 2'-deoxy-2'-fluorouridine-3'-phosphate
  modified_base 7: mod_base = OTHER; note = 2'-O-methyladenosine-3'-phosphate
  modified_base 8: mod_base = OTHER; note = 2'-O-methyladenosine-3'-phosphate
  modified_base 9: mod_base = OTHER; note = 2'-O-methyluridine-3'-phosphate
  modified_base 10: mod_base = OTHER; note = 2'-O-methyluridine-3'-phosphate
  modified_base 11: mod_base = OTHER; note = 2'-O-methyluridine-3'-phosphate
  modified_base 12: mod_base = OTHER; note = 2'-O-methyluridine-3'-phosphate
  modified_base 13: mod_base = OTHER; note = 2'-O-methyluridine-3'-phosphate
  modified_base 14: mod_base = OTHER; note = 2'-deoxy-2'-fluorouridine-3'-phosphate
  modified_base 15: mod_base = OTHER; note = 2'-O-methyluridine-3'-phosphate
  modified_base 16: mod_base = OTHER; note = 2'-deoxy-2'-fluorocytidine-3'-phosphate
  modified_base 17: mod_base = OTHER; note = 2'-O-methylcytidine-3'-phosphate
  modified_base 18: mod_base = OTHER; note = 2'-O-methyladenosine-3'-phosphate
  modified_base 19: mod_base = OTHER; note = 2'-O-methylguanosine-3'-phosphate
  modified_base 20: mod_base = OTHER; note = 2'-O-methyladenosine-3'-phosphate
  modified_base 21: mod_base = OTHER; note = 2'-O-methylcytidine-3'-phosphate
  modified_base 22: mod_base = OTHER; note = 2'-O-methylcytidine-3'-phosphate
  modified_base 23: mod_base = OTHER; note = 2'-O-methylcytidine
tgcagtaatttttttccagaccc

SEQ ID NO: 5040 - RNA, 23 nt, synthetic construct
  source 1..23: mol_type = other RNA
  modified_base 1: mod_base = OTHER; note = 2'-O-methyluridine-3'-phosphate 5'phosphate
  modified_base 2: mod_base = OTHER; note = 2'-deoxy-2'-fluoroguanosine-3'-phosphate
  modified_base 3: mod_base = OTHER; note = 2'-O-methylguanosine-3'-phosphate
  modified_base 4: mod_base = OTHER; note = 2'-O-methylcytidine-3'-phosphate
  modified_base 5: mod_base = OTHER; note = 2'-O-methyladenosine-3'-phosphate
  modified_base 6: mod_base = OTHER; note = 2'-deoxy-2'-fluoroguanosine-3'-phosphate
  modified_base 7: mod_base = OTHER; note = 2'-O-methyluridine-3'-phosphate
  modified_base 8: mod_base = OTHER; note = 2'-O-methyladenosine-3'-phosphate
  modified_base 9: mod_base = OTHER; note = 2'-O-methyladenosine-3'-phosphate
  modified_base 10: mod_base = OTHER; note = 2'-O-methyluridine-3'-phosphate
  modified_base 11: mod_base = OTHER; note = 2'-O-methyluridine-3'-phosphate
  modified_base 12: mod_base = OTHER; note = 2'-O-methyluridine-3'-phosphate
  modified_base 13: mod_base = OTHER; note = 2'-O-methyluridine-3'-phosphate
  modified_base 14: mod_base = OTHER; note = 2'-deoxy-2'-fluorouridine-3'-phosphate
  modified_base 15: mod_base = OTHER; note = 2'-O-methyluridine-3'-phosphate
  modified_base 16: mod_base = OTHER; note = 2'-deoxy-2'-fluorouridine-3'-phosphate
  modified_base 17: mod_base = OTHER; note = 2'-O-methylcytidine-3'-phosphate
  modified_base 18: mod_base = OTHER; note = 2'-O-methylcytidine-3'-phosphate
  modified_base 19: mod_base = OTHER; note = 2'-O-methyladenosine-3'-phosphate
  modified_base 20: mod_base = OTHER; note = 2'-O-methylguanosine-3'-phosphate
  modified_base 21: mod_base = OTHER; note = 2'-O-methyladenosine-3'-phosphate
  modified_base 22: mod_base = OTHER; note = 2'-O-methylcytidine-3'-phosphate
  modified_base 23: mod_base = OTHER; note = 2'-O-methylcytidine
tggcagtaatttttttccagacc

SEQ ID NO: 5041 - RNA, 23 nt, synthetic construct
  source 1..23: mol_type = other RNA
  modified_base 1: mod_base = OTHER; note = 2'-O-methyluridine-3'-phosphate 5'phosphate
  modified_base 2: mod_base = OTHER; note = 2'-deoxy-2'-fluorocytidine-3'-phosphate
  modified_base 3: mod_base = OTHER; note = 2'-O-methylguanosine-3'-phosphate
  modified_base 4: mod_base = OTHER; note = 2'-O-methylguanosine-3'-phosphate
  modified_base 5: mod_base = OTHER; note = 2'-O-methylcytidine-3'-phosphate
  modified_base 6: mod_base = OTHER; note = 2'-deoxy-2'-fluoroadenosine-3'-phosphate
  modified_base 7: mod_base = OTHER; note = 2'-O-methylguanosine-3'-phosphate
  modified_base 8: mod_base = OTHER; note = 2'-O-methyluridine-3'-phosphate
  modified_base 9: mod_base = OTHER; note = 2'-O-methyladenosine-3'-phosphate
  modified_base 10: mod_base = OTHER; note = 2'-O-methyladenosine-3'-phosphate
  modified_base 11: mod_base = OTHER; note = 2'-O-methyluridine-3'-phosphate
  modified_base 12: mod_base = OTHER; note = 2'-O-methyluridine-3'-phosphate
  modified_base 13: mod_base = OTHER; note = 2'-O-methyluridine-3'-phosphate
  modified_base 14: mod_base = OTHER; note = 2'-deoxy-2'-fluorouridine-3'-phosphate
  modified_base 15: mod_base = OTHER; note = 2'-O-methyluridine-3'-phosphate
  modified_base 16: mod_base = OTHER; note = 2'-deoxy-2'-fluorouridine-3'-phosphate
  modified_base 17: mod_base = OTHER; note = 2'-O-methyluridine-3'-phosphate
  modified_base 18: mod_base = OTHER; note = 2'-O-methylcytidine-3'-phosphate
  modified_base 19: mod_base = OTHER; note = 2'-O-methylcytidine-3'-phosphate
  modified_base 20: mod_base = OTHER; note = 2'-O-methyladenosine-3'-phosphate
  modified_base 21: mod_base = OTHER; note = 2'-O-methylguanosine-3'-phosphate
  modified_base 22: mod_base = OTHER; note = 2'-O-methyladenosine-3'-phosphate
  modified_base 23: mod_base = OTHER; note = 2'-O-methylcytidine
tcggcagtaatttttttccagac

SEQ ID NO: 5042 - RNA, 23 nt, synthetic construct
  source 1..23: mol_type = other RNA
  modified_base 1: mod_base = OTHER; note = 2'-O-methyluridine-3'-phosphate 5'phosphate
  modified_base 2: mod_base = OTHER; note = 2'-deoxy-2'-fluoroadenosine-3'-phosphate
  modified_base 3: mod_base = OTHER; note = 2'-O-methylcytidine-3'-phosphate
  modified_base 4: mod_base = OTHER; note = 2'-O-methylguanosine-3'-phosphate
  modified_base 5: mod_base = OTHER; note = 2'-O-methylguanosine-3'-phosphate
  modified_base 6: mod_base = OTHER; note = 2'-deoxy-2'-fluorocytidine-3'-phosphate
  modified_base 7: mod_base = OTHER; note = 2'-O-methyladenosine-3'-phosphate
  modified_base 8: mod_base = OTHER; note = 2'-O-methylguanosine-3'-phosphate
  modified_base 9: mod_base = OTHER; note = 2'-O-methyluridine-3'-phosphate
  modified_base 10: mod_base = OTHER; note = 2'-O-methyladenosine-3'-phosphate
  modified_base 11: mod_base = OTHER; note = 2'-O-methyladenosine-3'-phosphate
  modified_base 12: mod_base = OTHER; note = 2'-O-methyluridine-3'-phosphate
  modified_base 13: mod_base = OTHER; note = 2'-O-methyluridine-3'-phosphate
  modified_base 14: mod_base = OTHER; note = 2'-deoxy-2'-fluorouridine-3'-phosphate
  modified_base 15: mod_base = OTHER; note = 2'-O-methyluridine-3'-phosphate
  modified_base 16: mod_base = OTHER; note = 2'-deoxy-2'-fluorouridine-3'-phosphate
  modified_base 17: mod_base = OTHER; note = 2'-O-methyluridine-3'-phosphate
  modified_base 18: mod_base = OTHER; note = 2'-O-methyluridine-3'-phosphate
  modified_base 19: mod_base = OTHER; note = 2'-O-methylcytidine-3'-phosphate
  modified_base 20: mod_base = OTHER; note = 2'-O-methylcytidine-3'-phosphate
  modified_base 21: mod_base = OTHER; note = 2'-O-methyladenosine-3'-phosphate
  modified_base 22: mod_base = OTHER; note = 2'-O-methylguanosine-3'-phosphate
  modified_base 23: mod_base = OTHER; note = 2'-O-methyladenosine
tacggcagtaatttttttccaga

SEQ ID NO: 5043 - RNA, 23 nt, synthetic construct
  source 1..23: mol_type = other RNA
  modified_base 1: mod_base = OTHER; note = 2'-O-methyluridine-3'-phosphate 5'phosphate
  modified_base 2: mod_base = OTHER; note = 2'-deoxy-2'-fluoroadenosine-3'-phosphate
  modified_base 3: mod_base = OTHER; note = 2'-O-methylcytidine-3'-phosphate
  modified_base 4: mod_base = OTHER; note = 2'-O-methyladenosine-3'-phosphate
  modified_base 5: mod_base = OTHER; note = 2'-O-methyluridine-3'-phosphate
  modified_base 6: mod_base = OTHER; note = 2'-deoxy-2'-fluorocytidine-3'-phosphate
  modified_base 7: mod_base = OTHER; note = 2'-O-methyladenosine-3'-phosphate
  modified_base 8: mod_base = OTHER; note = 2'-O-methylcytidine-3'-phosphate
  modified_base 9: mod_base = OTHER; note = 2'-O-methylcytidine-3'-phosphate
  modified_base 10: mod_base = OTHER; note = 2'-O-methyladenosine-3'-phosphate
  modified_base 11: mod_base = OTHER; note = 2'-O-methyluridine-3'-phosphate
  modified_base 12: mod_base = OTHER; note = 2'-O-methylcytidine-3'-phosphate
  modified_base 13: mod_base = OTHER; note = 2'-O-methyladenosine-3'-phosphate
  modified_base 14: mod_base = OTHER; note = 2'-deoxy-2'-fluoroguanosine-3'-phosphate
  modified_base 15: mod_base = OTHER; note = 2'-O-methylguanosine-3'-phosphate
  modified_base 16: mod_base = OTHER; note = 2'-deoxy-2'-fluoroguanosine-3'-phosphate
  modified_base 17: mod_base = OTHER; note = 2'-O-methyluridine-3'-phosphate
  modified_base 18: mod_base = OTHER; note = 2'-O-methyluridine-3'-phosphate
  modified_base 19: mod_base = OTHER; note = 2'-O-methyladenosine-3'-phosphate
  modified_base 20: mod_base = OTHER; note = 2'-O-methylcytidine-3'-phosphate
  modified_base 21: mod_base = OTHER; note = 2'-O-methylguanosine-3'-phosphate
  modified_base 22: mod_base = OTHER; note = 2'-O-methylguanosine-3'-phosphate
  modified_base 23: mod_base = OTHER; note = 2'-O-methylcytidine
tacatcaccatcagggttacggc

SEQ ID NO: 5044 - RNA, 23 nt, synthetic construct
  source 1..23: mol_type = other RNA
  modified_base 1: mod_base = OTHER; note = 2'-O-methyluridine-3'-phosphate 5'phosphate
  modified_base 2: mod_base = OTHER; note = 2'-deoxy-2'-fluorocytidine-3'-phosphate
  modified_base 3: mod_base = OTHER; note = 2'-O-methylcytidine-3'-phosphate
  modified_base 4: mod_base = OTHER; note = 2'-O-methyluridine-3'-phosphate
  modified_base 5: mod_base = OTHER; note = 2'-O-methyladenosine-3'-phosphate
  modified_base 6: mod_base = OTHER; note = 2'-deoxy-2'-fluorocytidine-3'-phosphate
  modified_base 7: mod_base = OTHER; note = 2'-O-methyladenosine-3'-phosphate
  modified_base 8: mod_base = OTHER; note = 2'-O-methyluridine-3'-phosphate
  modified_base 9: mod_base = OTHER; note = 2'-O-methylcytidine-3'-phosphate
  modified_base 10: mod_base = OTHER; note = 2'-O-methyladenosine-3'-phosphate
  modified_base 11: mod_base = OTHER; note = 2'-O-methylcytidine-3'-phosphate
  modified_base 12: mod_base = OTHER; note = 2'-O-methylcytidine-3'-phosphate
  modified_base 13: mod_base = OTHER; note = 2'-O-methyladenosine-3'-phosphate
  modified_base 14: mod_base = OTHER; note = 2'-deoxy-2'-fluorouridine-3'-phosphate
  modified_base 15: mod_base = OTHER; note = 2'-O-methylcytidine-3'-phosphate
  modified_base 16: mod_base = OTHER; note = 2'-deoxy-2'-fluoroadenosine-3'-phosphate
  modified_base 17: mod_base = OTHER; note = 2'-O-methylguanosine-3'-phosphate
  modified_base 18: mod_base = OTHER; note = 2'-O-methylguanosine-3'-phosphate
  modified_base 19: mod_base = OTHER; note = 2'-O-methylguanosine-3'-phosphate
  modified_base 20: mod_base = OTHER; note = 2'-O-methyluridine-3'-phosphate
  modified_base 21: mod_base = OTHER; note = 2'-O-methyluridine-3'-phosphate
  modified_base 22: mod_base = OTHER; note = 2'-O-methyladenosine-3'-phosphate
  modified_base 23: mod_base = OTHER; note = 2'-O-methylcytidine
tcctacatcaccatcagggttac

SEQ ID NO: 5045 - RNA, 23 nt, synthetic construct
  source 1..23: mol_type = other RNA
  modified_base 1: mod_base = OTHER; note = 2'-O-methyluridine-3'-phosphate 5'phosphate
  modified_base 2: mod_base = OTHER; note = 2'-deoxy-2'-fluorocytidine-3'-phosphate
  modified_base 3: mod_base = OTHER; note = 2'-O-methyladenosine-3'-phosphate
  modified_base 4: mod_base = OTHER; note = 2'-O-methylcytidine-3'-phosphate
  modified_base 5: mod_base = OTHER; note = 2'-O-methylcytidine-3'-phosphate
  modified_base 6: mod_base = OTHER; note = 2'-deoxy-2'-fluorouridine-3'-phosphate
  modified_base 7: mod_base = OTHER; note = 2'-O-methyladenosine-3'-phosphate
  modified_base 8: mod_base = OTHER; note = 2'-O-methylcytidine-3'-phosphate
  modified_base 9: mod_base = OTHER; note = 2'-O-methyladenosine-3'-phosphate
  modified_base 10: mod_base = OTHER; note = 2'-O-methyluridine-3'-phosphate
  modified_base 11: mod_base = OTHER; note = 2'-O-methylcytidine-3'-phosphate
  modified_base 12: mod_base = OTHER; note = 2'-O-methyladenosine-3'-phosphate
  modified_base 13: mod_base = OTHER; note = 2'-O-methylcytidine-3'-phosphate
  modified_base 14: mod_base = OTHER; note = 2'-deoxy-2'-fluorocytidine-3'-phosphate
  modified_base 15: mod_base = OTHER; note = 2'-O-methyladenosine-3'-phosphate
  modified_base 16: mod_base = OTHER; note = 2'-deoxy-2'-fluorouridine-3'-phosphate
  modified_base 17: mod_base = OTHER; note = 2'-O-methylcytidine-3'-phosphate
  modified_base 18: mod_base = OTHER; note = 2'-O-methyladenosine-3'-phosphate
  modified_base 19: mod_base = OTHER; note = 2'-O-methylguanosine-3'-phosphate
  modified_base 20: mod_base = OTHER; note = 2'-O-methylguanosine-3'-phosphate
  modified_base 21: mod_base = OTHER; note = 2'-O-methylguanosine-3'-phosphate
  modified_base 22: mod_base = OTHER; note = 2'-O-methyluridine-3'-phosphate
  modified_base 23: mod_base = OTHER; note = 2'-O-methyluridine
tcacctacatcaccatcagggtt

SEQ ID NO: 5046 - RNA, 23 nt, synthetic construct
  source 1..23: mol_type = other RNA
  modified_base 1: mod_base = OTHER; note = 2'-O-methyluridine-3'-phosphate 5'phosphate
  modified_base 2: mod_base = OTHER; note = 2'-deoxy-2'-fluorocytidine-3'-phosphate
  modified_base 3: mod_base = OTHER; note = 2'-O-methylcytidine-3'-phosphate
  modified_base 4: mod_base = OTHER; note = 2'-O-methyladenosine-3'-phosphate
  modified_base 5: mod_base = OTHER; note = 2'-O-methylcytidine-3'-phosphate
  modified_base 6: mod_base = OTHER; note = 2'-deoxy-2'-fluorocytidine-3'-phosphate
  modified_base 7: mod_base = OTHER; note = 2'-O-methyluridine-3'-phosphate
  modified_base 8: mod_base = OTHER; note = 2'-O-methyladenosine-3'-phosphate
  modified_base 9: mod_base = OTHER; note = 2'-O-methylcytidine-3'-phosphate
  modified_base 10: mod_base = OTHER; note = 2'-O-methyladenosine-3'-phosphate
  modified_base 11: mod_base = OTHER; note = 2'-O-methyluridine-3'-phosphate
  modified_base 12: mod_base = OTHER; note = 2'-O-methylcytidine-3'-phosphate
  modified_base 13: mod_base = OTHER; note = 2'-O-methyladenosine-3'-phosphate
  modified_base 14: mod_base = OTHER; note = 2'-deoxy-2'-fluorocytidine-3'-phosphate
  modified_base 15: mod_base = OTHER; note = 2'-O-methylcytidine-3'-phosphate
  modified_base 16: mod_base = OTHER; note = 2'-deoxy-2'-fluoroadenosine-3'-phosphate
  modified_base 17: mod_base = OTHER; note = 2'-O-methyluridine-3'-phosphate
  modified_base 18: mod_base = OTHER; note = 2'-O-methylcytidine-3'-phosphate
  modified_base 19: mod_base = OTHER; note = 2'-O-methyladenosine-3'-phosphate
  modified_base 20: mod_base = OTHER; note = 2'-O-methylguanosine-3'-phosphate
  modified_base 21: mod_base = OTHER; note = 2'-O-methylguanosine-3'-phosphate
  modified_base 22: mod_base = OTHER; note = 2'-O-methylguanosine-3'-phosphate
  modified_base 23: mod_base = OTHER; note = 2'-O-methyluridine
tccacctacatcaccatcagggt

SEQ ID NO: 5047 - RNA, 23 nt, synthetic construct
  source 1..23: mol_type = other RNA
  modified_base 1: mod_base = OTHER; note = 2'-O-methyluridine-3'-phosphate 5'phosphate
  modified_base 2: mod_base = OTHER; note = 2'-deoxy-2'-fluoroguanosine-3'-phosphate
  modified_base 3: mod_base = OTHER; note = 2'-O-methyluridine-3'-phosphate
  modified_base 4: mod_base = OTHER; note = 2'-O-methyladenosine-3'-phosphate
  modified_base 5: mod_base = OTHER; note = 2'-O-methylguanosine-3'-phosphate
  modified_base 6: mod_base = OTHER; note = 2'-deoxy-2'-fluorocytidine-3'-phosphate
  modified_base 7: mod_base = OTHER; note = 2'-O-methyladenosine-3'-phosphate
  modified_base 8: mod_base = OTHER; note = 2'-O-methylcytidine-3'-phosphate
  modified_base 9: mod_base = OTHER; note = 2'-O-methylcytidine-3'-phosphate
  modified_base 10: mod_base = OTHER; note = 2'-O-methyladenosine-3'-phosphate
  modified_base 11: mod_base = OTHER; note = 2'-O-methylguanosine-3'-phosphate
  modified_base 12: mod_base = OTHER; note = 2'-O-methylguanosine-3'-phosphate
  modified_base 13: mod_base = OTHER; note = 2'-O-methylguanosine-3'-phosphate
  modified_base 14: mod_base = OTHER; note = 2'-deoxy-2'-fluoroadenosine-3'-phosphate
  modified_base 15: mod_base = OTHER; note = 2'-O-methylcytidine-3'-phosphate
  modified_base 16: mod_base = OTHER; note = 2'-deoxy-2'-fluorocytidine-3'-phosphate
  modified_base 17: mod_base = OTHER; note = 2'-O-methyladenosine-3'-phosphate
  modified_base 18: mod_base = OTHER; note = 2'-O-methylcytidine-3'-phosphate
  modified_base 19: mod_base = OTHER; note = 2'-O-methylcytidine-3'-phosphate
  modified_base 20: mod_base = OTHER; note = 2'-O-methyluridine-3'-phosphate
  modified_base 21: mod_base = OTHER; note = 2'-O-methyladenosine-3'-phosphate
  modified_base 22: mod_base = OTHER; note = 2'-O-methylcytidine-3'-phosphate
  modified_base 23: mod_base = OTHER; note = 2'-O-methyladenosine
tgtagcaccagggaccacctaca

SEQ ID NO: 5048 - RNA, 23 nt, synthetic construct
  source 1..23: mol_type = other RNA
  modified_base 1: mod_base = OTHER; note = 2'-O-methyluridine-3'-phosphate 5'phosphate
  modified_base 2: mod_base = OTHER; note = 2'-deoxy-2'-fluorouridine-3'-phosphate
  modified_base 3: mod_base = OTHER; note = 2'-O-methylguanosine-3'-phosphate
  modified_base 4: mod_base = OTHER; note = 2'-O-methyluridine-3'-phosphate
  modified_base 5: mod_base = OTHER; note = 2'-O-methyladenosine-3'-phosphate
  modified_base 6: mod_base = OTHER; note = 2'-deoxy-2'-fluoroguanosine-3'-phosphate
  modified_base 7: mod_base = OTHER; note = 2'-O-methylcytidine-3'-phosphate
  modified_base 8: mod_base = OTHER; note = 2'-O-methyladenosine-3'-phosphate
  modified_base 9: mod_base = OTHER; note = 2'-O-methylcytidine-3'-phosphate
  modified_base 10: mod_base = OTHER; note = 2'-O-methylcytidine-3'-phosphate
  modified_base 11: mod_base = OTHER; note = 2'-O-methyladenosine-3'-phosphate
  modified_base 12: mod_base = OTHER; note = 2'-O-methylguanosine-3'-phosphate
  modified_base 13: mod_base = OTHER; note = 2'-O-methylguanosine-3'-phosphate
  modified_base 14: mod_base = OTHER; note = 2'-deoxy-2'-fluoroguanosine-3'-phosphate
  modified_base 15: mod_base = OTHER; note = 2'-O-methyladenosine-3'-phosphate
  modified_base 16: mod_base = OTHER; note = 2'-deoxy-2'-fluorocytidine-3'-phosphate
  modified_base 17: mod_base = OTHER; note = 2'-O-methylcytidine-3'-phosphate
  modified_base 18: mod_base = OTHER; note = 2'-O-methyladenosine-3'-phosphate
  modified_base 19: mod_base = OTHER; note = 2'-O-methylcytidine-3'-phosphate
  modified_base 20: mod_base = OTHER; note = 2'-O-methylcytidine-3'-phosphate
  modified_base 21: mod_base = OTHER; note = 2'-O-methyluridine-3'-phosphate
  modified_base 22: mod_base = OTHER; note = 2'-O-methyladenosine-3'-phosphate
  modified_base 23: mod_base = OTHER; note = 2'-O-methylcytidine
ttgtagcaccagggaccacctac

SEQ ID NO: 5049 - RNA, 23 nt, synthetic construct
  source 1..23: mol_type = other RNA
  modified_base 1: mod_base = OTHER; note = 2'-O-methyluridine-3'-phosphate 5'phosphate
  modified_base 2: mod_base = OTHER; note = 2'-deoxy-2'-fluorocytidine-3'-phosphate
  modified_base 3: mod_base = OTHER; note = 2'-O-methylguanosine-3'-phosphate
  modified_base 4: mod_base = OTHER; note = 2'-O-methyluridine-3'-phosphate
  modified_base 5: mod_base = OTHER; note = 2'-O-methylguanosine-3'-phosphate
  modified_base 6: mod_base = OTHER; note = 2'-deoxy-2'-fluorouridine-3'-phosphate
  modified_base 7: mod_base = OTHER; note = 2'-O-methyladenosine-3'-phosphate
  modified_base 8: mod_base = OTHER; note = 2'-O-methylguanosine-3'-phosphate
  modified_base 9: mod_base = OTHER; note = 2'-O-methylcytidine-3'-phosphate
  modified_base 10: mod_base = OTHER; note = 2'-O-methyladenosine-3'-phosphate
  modified_base 11: mod_base = OTHER; note = 2'-O-methylcytidine-3'-phosphate
  modified_base 12: mod_base = OTHER; note = 2'-O-methylcytidine-3'-phosphate
  modified_base 13: mod_base = OTHER; note = 2'-O-methyladenosine-3'-phosphate
  modified_base 14: mod_base = OTHER; note = 2'-deoxy-2'-fluoroguanosine-3'-phosphate
  modified_base 15: mod_base = OTHER; note = 2'-O-methylguanosine-3'-phosphate
  modified_base 16: mod_base = OTHER; note = 2'-deoxy-2'-fluoroguanosine-3'-phosphate
  modified_base 17: mod_base = OTHER; note = 2'-O-methyladenosine-3'-phosphate
  modified_base 18: mod_base = OTHER; note = 2'-O-methylcytidine-3'-phosphate
  modified_base 19: mod_base = OTHER; note = 2'-O-methylcytidine-3'-phosphate
  modified_base 20: mod_base = OTHER; note = 2'-O-methyladenosine-3'-phosphate
  modified_base 21: mod_base = OTHER; note = 2'-O-methylcytidine-3'-phosphate
  modified_base 22: mod_base = OTHER; note = 2'-O-methylcytidine-3'-phosphate
  modified_base 23: mod_base = OTHER; note = 2'-O-methyluridine
tcgtgtagcaccagggaccacct

SEQ ID NO: 5050 - RNA, 23 nt, synthetic construct
  source 1..23: mol_type = other RNA
  modified_base 1: mod_base = OTHER; note = 2'-O-methyluridine-3'-phosphate 5'phosphate
  modified_base 2: mod_base = OTHER; note = 2'-deoxy-2'-fluoroguanosine-3'-phosphate
  modified_base 3: mod_base = OTHER; note = 2'-O-methyladenosine-3'-phosphate
  modified_base 4: mod_base = OTHER; note = 2'-O-methyluridine-3'-phosphate
  modified_base 5: mod_base = OTHER; note = 2'-O-methyluridine-3'-phosphate
  modified_base 6: mod_base = OTHER; note = 2'-deoxy-2'-fluorouridine-3'-phosphate
  modified_base 7: mod_base = OTHER; note = 2'-O-methylguanosine-3'-phosphate
  modified_base 8: mod_base = OTHER; note = 2'-O-methyluridine-3'-phosphate
  modified_base 9: mod_base = OTHER; note = 2'-O-methylcytidine-3'-phosphate
  modified_base 10: mod_base = OTHER; note = 2'-O-methylguanosine-3'-phosphate
  modified_base 11: mod_base = OTHER; note = 2'-O-methyluridine-3'-phosphate
  modified_base 12: mod_base = OTHER; note = 2'-O-methylguanosine-3'-phosphate
  modified_base 13: mod_base = OTHER; note = 2'-O-methyluridine-3'-phosphate
  modified_base 14: mod_base = OTHER; note = 2'-deoxy-2'-fluoroadenosine-3'-phosphate
  modified_base 15: mod_base = OTHER; note = 2'-O-methylguanosine-3'-phosphate
  modified_base 16: mod_base = OTHER; note = 2'-deoxy-2'-fluorocytidine-3'-phosphate
  modified_base 17: mod_base = OTHER; note = 2'-O-methyladenosine-3'-phosphate
  modified_base 18: mod_base = OTHER; note = 2'-O-methylcytidine-3'-phosphate
  modified_base 19: mod_base = OTHER; note = 2'-O-methylcytidine-3'-phosphate
  modified_base 20: mod_base = OTHER; note = 2'-O-methyladenosine-3'-phosphate
  modified_base 21: mod_base = OTHER; note = 2'-O-methylguanosine-3'-phosphate
  modified_base 22: mod_base = OTHER; note = 2'-O-methylguanosine-3'-phosphate
  modified_base 23: mod_base = OTHER; note = 2'-O-methylguanosine
tgatttgtcgtgtagcaccaggg

SEQ ID NO: 5051 - RNA, 23 nt, synthetic construct
  source 1..23: mol_type = other RNA
  modified_base 1: mod_base = OTHER; note = 2'-O-methyluridine-3'-phosphate 5'phosphate
  modified_base 2: mod_base = OTHER; note = 2'-deoxy-2'-fluorouridine-3'-phosphate
  modified_base 3: mod_base = OTHER; note = 2'-O-methylguanosine-3'-phosphate
  modified_base 4: mod_base = OTHER; note = 2'-O-methylguanosine-3'-phosphate
  modified_base 5: mod_base = OTHER; note = 2'-O-methyladenosine-3'-phosphate
  modified_base 6: mod_base = OTHER; note = 2'-deoxy-2'-fluorouridine-3'-phosphate
  modified_base 7: mod_base = OTHER; note = 2'-O-methyluridine-3'-phosphate
  modified_base 8: mod_base = OTHER; note = 2'-O-methyluridine-3'-phosphate
  modified_base 9: mod_base = OTHER; note = 2'-O-methylguanosine-3'-phosphate
  modified_base 10: mod_base = OTHER; note = 2'-O-methyluridine-3'-phosphate
  modified_base 11: mod_base = OTHER; note = 2'-O-methylcytidine-3'-phosphate
  modified_base 12: mod_base = OTHER; note = 2'-O-methylguanosine-3'-phosphate
  modified_base 13: mod_base = OTHER; note = 2'-O-methyluridine-3'-phosphate
  modified_base 14: mod_base = OTHER; note = 2'-deoxy-2'-fluoroguanosine-3'-phosphate
  modified_base 15: mod_base = OTHER; note = 2'-O-methyluridine-3'-phosphate
  modified_base 16: mod_base = OTHER; note = 2'-deoxy-2'-fluoroadenosine-3'-phosphate
  modified_base 17: mod_base = OTHER; note = 2'-O-methylguanosine-3'-phosphate
  modified_base 18: mod_base = OTHER; note = 2'-O-methylcytidine-3'-phosphate
  modified_base 19: mod_base = OTHER; note = 2'-O-methyladenosine-3'-phosphate
  modified_base 20: mod_base = OTHER; note = 2'-O-methylcytidine-3'-phosphate
  modified_base 21: mod_base = OTHER; note = 2'-O-methylcytidine-3'-phosphate
  modified_base 22: mod_base = OTHER; note = 2'-O-methyladenosine-3'-phosphate
  modified_base 23: mod_base = OTHER; note = 2'-O-methylguanosine
ttggatttgtcgtgtagcaccag

SEQ ID NO: 5052 - RNA, 23 nt, synthetic construct
  source 1..23: mol_type = other RNA
  modified_base 1: mod_base = OTHER; note = 2'-O-methyluridine-3'-phosphate 5'phosphate
  modified_base 2: mod_base = OTHER; note = 2'-deoxy-2'-fluorouridine-3'-phosphate
  modified_base 3: mod_base = OTHER; note = 2'-O-methyluridine-3'-phosphate
  modified_base 4: mod_base = OTHER; note = 2'-O-methylguanosine-3'-phosphate
  modified_base 5: mod_base = OTHER; note = 2'-O-methylguanosine-3'-phosphate
  modified_base 6: mod_base = OTHER; note = 2'-deoxy-2'-fluoroadenosine-3'-phosphate
  modified_base 7: mod_base = OTHER; note = 2'-O-methyluridine-3'-phosphate
  modified_base 8: mod_base = OTHER; note = 2'-O-methyluridine-3'-phosphate
  modified_base 9: mod_base = OTHER; note = 2'-O-methyluridine-3'-phosphate
  modified_base 10: mod_base = OTHER; note = 2'-O-methylguanosine-3'-phosphate
  modified_base 11: mod_base = OTHER; note = 2'-O-methyluridine-3'-phosphate
  modified_base 12: mod_base = OTHER; note = 2'-O-methylcytidine-3'-phosphate
  modified_base 13: mod_base = OTHER; note = 2'-O-methylguanosine-3'-phosphate
  modified_base 14: mod_base = OTHER; note = 2'-deoxy-2'-fluorouridine-3'-phosphate
  modified_base 15: mod_base = OTHER; note = 2'-O-methylguanosine-3'-phosphate
  modified_base 16: mod_base = OTHER; note = 2'-deoxy-2'-fluorouridine-3'-phosphate
  modified_base 17: mod_base = OTHER; note = 2'-O-methyladenosine-3'-phosphate
  modified_base 18: mod_base = OTHER; note = 2'-O-methylguanosine-3'-phosphate
  modified_base 19: mod_base = OTHER; note = 2'-O-methylcytidine-3'-phosphate
  modified_base 20: mod_base = OTHER; note = 2'-O-methyladenosine-3'-phosphate
  modified_base 21: mod_base = OTHER; note = 2'-O-methylcytidine-3'-phosphate
  modified_base 22: mod_base = OTHER; note = 2'-O-methylcytidine-3'-phosphate
  modified_base 23: mod_base = OTHER; note = 2'-O-methyladenosine
tttggatttgtcgtgtagcacca

SEQ ID NO: 5053 - RNA, 23 nt, synthetic construct
  source 1..23: mol_type = other RNA
  modified_base 1: mod_base = OTHER; note = 2'-O-methyluridine-3'-phosphate 5'phosphate
  modified_base 2: mod_base = OTHER; note = 2'-deoxy-2'-fluorocytidine-3'-phosphate
  modified_base 3: mod_base = OTHER; note = 2'-O-methyluridine-3'-phosphate
  modified_base 4: mod_base = OTHER; note = 2'-O-methyluridine-3'-phosphate
  modified_base 5: mod_base = OTHER; note = 2'-O-methylguanosine-3'-phosphate
  modified_base 6: mod_base = OTHER; note = 2'-deoxy-2'-fluoroguanosine-3'-phosphate
  modified_base 7: mod_base = OTHER; note = 2'-O-methyladenosine-3'-phosphate
  modified_base 8: mod_base = OTHER; note = 2'-O-methyluridine-3'-phosphate
  modified_base 9: mod_base = OTHER; note = 2'-O-methyluridine-3'-phosphate
  modified_base 10: mod_base = OTHER; note = 2'-O-methyluridine-3'-phosphate
  modified_base 11: mod_base = OTHER; note = 2'-O-methylguanosine-3'-phosphate
  modified_base 12: mod_base = OTHER; note = 2'-O-methyluridine-3'-phosphate
  modified_base 13: mod_base = OTHER; note = 2'-O-methylcytidine-3'-phosphate
  modified_base 14: mod_base = OTHER; note = 2'-deoxy-2'-fluoroguanosine-3'-phosphate
  modified_base 15: mod_base = OTHER; note = 2'-O-methyluridine-3'-phosphate
  modified_base 16: mod_base = OTHER; note = 2'-deoxy-2'-fluoroguanosine-3'-phosphate
  modified_base 17: mod_base = OTHER; note = 2'-O-methyluridine-3'-phosphate
  modified_base 18: mod_base = OTHER; note = 2'-O-methyladenosine-3'-phosphate
  modified_base 19: mod_base = OTHER; note = 2'-O-methylguanosine-3'-phosphate
  modified_base 20: mod_base = OTHER; note = 2'-O-methylcytidine-3'-phosphate
  modified_base 21: mod_base = OTHER; note = 2'-O-methyladenosine-3'-phosphate
  modified_base 22: mod_base = OTHER; note = 2'-O-methylcytidine-3'-phosphate
  modified_base 23: mod_base = OTHER; note = 2'-O-methylcytidine
tcttggatttgtcgtgtagcacc

SEQ ID NO: 5054 - RNA, 23 nt, synthetic construct
  source 1..23: mol_type = other RNA
  modified_base 1: mod_base = OTHER; note = 2'-O-methyluridine-3'-phosphate 5'phosphate
  modified_base 2: mod_base = OTHER; note = 2'-deoxy-2'-fluorouridine-3'-phosphate
  modified_base 3: mod_base = OTHER; note = 2'-O-methylcytidine-3'-phosphate
  modified_base 4: mod_base = OTHER; note = 2'-O-methyluridine-3'-phosphate
  modified_base 5: mod_base = OTHER; note = 2'-O-methyluridine-3'-phosphate
  modified_base 6: mod_base = OTHER; note = 2'-deoxy-2'-fluoroguanosine-3'-phosphate
  modified_base 7: mod_base = OTHER; note = 2'-O-methylguanosine-3'-phosphate
  modified_base 8: mod_base = OTHER; note = 2'-O-methyladenosine-3'-phosphate
  modified_base 9: mod_base = OTHER; note = 2'-O-methyluridine-3'-phosphate
  modified_base 10: mod_base = OTHER; note = 2'-O-methyluridine-3'-phosphate
  modified_base 11: mod_base = OTHER; note = 2'-O-methyluridine-3'-phosphate
  modified_base 12: mod_base = OTHER; note = 2'-O-methylguanosine-3'-phosphate
  modified_base 13: mod_base = OTHER; note = 2'-O-methyluridine-3'-phosphate
  modified_base 14: mod_base = OTHER; note = 2'-deoxy-2'-fluorocytidine-3'-phosphate
  modified_base 15: mod_base = OTHER; note = 2'-O-methylguanosine-3'-phosphate
  modified_base 16: mod_base = OTHER; note = 2'-deoxy-2'-fluorouridine-3'-phosphate
  modified_base 17: mod_base = OTHER; note = 2'-O-methylguanosine-3'-phosphate
  modified_base 18: mod_base = OTHER; note = 2'-O-methyluridine-3'-phosphate
  modified_base 19: mod_base = OTHER; note = 2'-O-methyladenosine-3'-phosphate
  modified_base 20: mod_base = OTHER; note = 2'-O-methylguanosine-3'-phosphate
  modified_base 21: mod_base = OTHER; note = 2'-O-methylcytidine-3'-phosphate
  modified_base 22: mod_base = OTHER; note = 2'-O-methyladenosine-3'-phosphate
  modified_base 23: mod_base = OTHER; note = 2'-O-methylcytidine
ttcttggatttgtcgtgtagcac

SEQ ID NO: 5055 - RNA, 23 nt, synthetic construct
  source 1..23: mol_type = other RNA
  modified_base 1: mod_base = OTHER; note = 2'-O-methyluridine-3'-phosphate 5'phosphate
  modified_base 2: mod_base = OTHER; note = 2'-deoxy-2'-fluorouridine-3'-phosphate
  modified_base 3: mod_base = OTHER; note = 2'-O-methyluridine-3'-phosphate
  modified_base 4: mod_base = OTHER; note = 2'-O-methylcytidine-3'-phosphate
  modified_base 5: mod_base = OTHER; note = 2'-O-methyluridine-3'-phosphate
  modified_base 6: mod_base = OTHER; note = 2'-deoxy-2'-fluorouridine-3'-phosphate
  modified_base 7: mod_base = OTHER; note = 2'-O-methylguanosine-3'-phosphate
  modified_base 8: mod_base = OTHER; note = 2'-O-methylguanosine-3'-phosphate
  modified_base 9: mod_base = OTHER; note = 2'-O-methyladenosine-3'-phosphate
  modified_base 10: mod_base = OTHER; note = 2'-O-methyluridine-3'-phosphate
  modified_base 11: mod_base = OTHER; note = 2'-O-methyluridine-3'-phosphate
  modified_base 12: mod_base = OTHER; note = 2'-O-methyluridine-3'-phosphate
  modified_base 13: mod_base = OTHER; note = 2'-O-methylguanosine-3'-phosphate
  modified_base 14: mod_base = OTHER; note = 2'-deoxy-2'-fluorouridine-3'-phosphate
  modified_base 15: mod_base = OTHER; note = 2'-O-methylcytidine-3'-phosphate
  modified_base 16: mod_base = OTHER; note = 2'-deoxy-2'-fluoroguanosine-3'-phosphate
  modified_base 17: mod_base = OTHER; note = 2'-O-methyluridine-3'-phosphate
  modified_base 18: mod_base = OTHER; note = 2'-O-methylguanosine-3'-phosphate
  modified_base 19: mod_base = OTHER; note = 2'-O-methyluridine-3'-phosphate
  modified_base 20: mod_base = OTHER; note = 2'-O-methyladenosine-3'-phosphate
  modified_base 21: mod_base = OTHER; note = 2'-O-methylguanosine-3'-phosphate
  modified_base 22: mod_base = OTHER; note = 2'-O-methylcytidine-3'-phosphate
  modified_base 23: mod_base = OTHER; note = 2'-O-methyladenosine
tttcttggatttgtcgtgtagca

SEQ ID NO: 5056 - RNA, 23 nt, synthetic construct
  source 1..23: mol_type = other RNA
  modified_base 1: mod_base = OTHER; note = 2'-O-methyluridine-3'-phosphate 5'phosphate
  modified_base 2: mod_base = OTHER; note = 2'-deoxy-2'-fluorouridine-3'-phosphate
  modified_base 3: mod_base = OTHER; note = 2'-O-methyluridine-3'-phosphate
  modified_base 4: mod_base = OTHER; note = 2'-O-methyluridine-3'-phosphate
  modified_base 5: mod_base = OTHER; note = 2'-O-methylcytidine-3'-phosphate
  modified_base 6: mod_base = OTHER; note = 2'-deoxy-2'-fluorouridine-3'-phosphate
  modified_base 7: mod_base = OTHER; note = 2'-O-methyluridine-3'-phosphate
  modified_base 8: mod_base = OTHER; note = 2'-O-methylguanosine-3'-phosphate
  modified_base 9: mod_base = OTHER; note = 2'-O-methylguanosine-3'-phosphate
  modified_base 10: mod_base = OTHER; note = 2'-O-methyladenosine-3'-phosphate
  modified_base 11: mod_base = OTHER; note = 2'-O-methyluridine-3'-phosphate
  modified_base 12: mod_base = OTHER; note = 2'-O-methyluridine-3'-phosphate
  modified_base 13: mod_base = OTHER; note = 2'-O-methyluridine-3'-phosphate
  modified_base 14: mod_base = OTHER; note = 2'-deoxy-2'-fluoroguanosine-3'-phosphate
  modified_base 15: mod_base = OTHER; note = 2'-O-methyluridine-3'-phosphate
  modified_base 16: mod_base = OTHER; note = 2'-deoxy-2'-fluorocytidine-3'-phosphate
  modified_base 17: mod_base = OTHER; note = 2'-O-methylguanosine-3'-phosphate
  modified_base 18: mod_base = OTHER; note = 2'-O-methyluridine-3'-phosphate
  modified_base 19: mod_base = OTHER; note = 2'-O-methylguanosine-3'-phosphate
  modified_base 20: mod_base = OTHER; note = 2'-O-methyluridine-3'-phosphate
  modified_base 21: mod_base = OTHER; note = 2'-O-methyladenosine-3'-phosphate
  modified_base 22: mod_base = OTHER; note = 2'-O-methylguanosine-3'-phosphate
  modified_base 23: mod_base = OTHER; note = 2'-O-methylcytidine
ttttcttggatttgtcgtgtagc

SEQ ID NO: 5057 - RNA, 23 nt, synthetic construct
  source 1..23: mol_type = other RNA
  modified_base 1: mod_base = OTHER; note = 2'-O-methyluridine-3'-phosphate 5'phosphate
  modified_base 2: mod_base = OTHER; note = 2'-deoxy-2'-fluorouridine-3'-phosphate
  modified_base 3: mod_base = OTHER; note = 2'-O-methyluridine-3'-phosphate
  modified_base 4: mod_base = OTHER; note = 2'-O-methyluridine-3'-phosphate
  modified_base 5: mod_base = OTHER; note = 2'-O-methyluridine-3'-phosphate
  modified_base 6: mod_base = OTHER; note = 2'-deoxy-2'-fluorocytidine-3'-phosphate
  modified_base 7: mod_base = OTHER; note = 2'-O-methyluridine-3'-phosphate
  modified_base 8: mod_base = OTHER; note = 2'-O-methyluridine-3'-phosphate
  modified_base 9: mod_base = OTHER; note = 2'-O-methylguanosine-3'-phosphate
  modified_base 10: mod_base = OTHER; note = 2'-O-methylguanosine-3'-phosphate
  modified_base 11: mod_base = OTHER; note = 2'-O-methyladenosine-3'-phosphate
  modified_base 12: mod_base = OTHER; note = 2'-O-methyluridine-3'-phosphate
  modified_base 13: mod_base = OTHER; note = 2'-O-methyluridine-3'-phosphate
  modified_base 14: mod_base = OTHER; note = 2'-deoxy-2'-fluorouridine-3'-phosphate
  modified_base 15: mod_base = OTHER; note = 2'-O-methylguanosine-3'-phosphate
  modified_base 16: mod_base = OTHER; note = 2'-deoxy-2'-fluorouridine-3'-phosphate
  modified_base 17: mod_base = OTHER; note = 2'-O-methylcytidine-3'-phosphate
  modified_base 18: mod_base = OTHER; note = 2'-O-methylguanosine-3'-phosphate
  modified_base 19: mod_base = OTHER; note = 2'-O-methyluridine-3'-phosphate
  modified_base 20: mod_base = OTHER; note = 2'-O-methylguanosine-3'-phosphate
  modified_base 21: mod_base = OTHER; note = 2'-O-methyluridine-3'-phosphate
  modified_base 22: mod_base = OTHER; note = 2'-O-methyladenosine-3'-phosphate
  modified_base 23: mod_base = OTHER; note = 2'-O-methylguanosine
tttttcttggatttgtcgtgtag

SEQ ID NO: 5058 - RNA, 23 nt, synthetic construct
  source 1..23: mol_type = other RNA
  modified_base 1: mod_base = OTHER; note = 2'-O-methyluridine-3'-phosphate 5'phosphate
  modified_base 2: mod_base = OTHER; note = 2'-deoxy-2'-fluoroguanosine-3'-phosphate
  modified_base 3: mod_base = OTHER; note = 2'-O-methyluridine-3'-phosphate
  modified_base 4: mod_base = OTHER; note = 2'-O-methyluridine-3'-phosphate
  modified_base 5: mod_base = OTHER; note = 2'-O-methyluridine-3'-phosphate
  modified_base 6: mod_base = OTHER; note = 2'-deoxy-2'-fluorouridine-3'-phosphate
  modified_base 7: mod_base = OTHER; note = 2'-O-methylcytidine-3'-phosphate
  modified_base 8: mod_base = OTHER; note = 2'-O-methyluridine-3'-phosphate
  modified_base 9: mod_base = OTHER; note = 2'-O-methyluridine-3'-phosphate
  modified_base 10: mod_base = OTHER; note = 2'-O-methylguanosine-3'-phosphate
  modified_base 11: mod_base = OTHER; note = 2'-O-methylguanosine-3'-phosphate
  modified_base 12: mod_base = OTHER; note = 2'-O-methyladenosine-3'-phosphate
  modified_base 13: mod_base = OTHER; note = 2'-O-methyluridine-3'-phosphate
  modified_base 14: mod_base = OTHER; note = 2'-deoxy-2'-fluorouridine-3'-phosphate
  modified_base 15: mod_base = OTHER; note = 2'-O-methyluridine-3'-phosphate
  modified_base 16: mod_base = OTHER; note = 2'-deoxy-2'-fluoroguanosine-3'-phosphate
  modified_base 17: mod_base = OTHER; note = 2'-O-methyluridine-3'-phosphate
  modified_base 18: mod_base = OTHER; note = 2'-O-methylcytidine-3'-phosphate
  modified_base 19: mod_base = OTHER; note = 2'-O-methylguanosine-3'-phosphate
  modified_base 20: mod_base = OTHER; note = 2'-O-methyluridine-3'-phosphate
  modified_base 21: mod_base = OTHER; note = 2'-O-methylguanosine-3'-phosphate
  modified_base 22: mod_base = OTHER; note = 2'-O-methyluridine-3'-phosphate
  modified_base 23: mod_base = OTHER; note = 2'-O-methyladenosine
tgttttcttggatttgtcgtgta

SEQ ID NO: 5059 - RNA, 23 nt, synthetic construct
  source 1..23: mol_type = other RNA
  modified_base 1: mod_base = OTHER; note = 2'-O-methyluridine-3'-phosphate 5'phosphate
  modified_base 2: mod_base = OTHER; note = 2'-deoxy-2'-fluoroadenosine-3'-phosphate
  modified_base 3: mod_base = OTHER; note = 2'-O-methylguanosine-3'-phosphate
  modified_base 4: mod_base = OTHER; note = 2'-O-methyluridine-3'-phosphate
  modified_base 5: mod_base = OTHER; note = 2'-O-methyluridine-3'-phosphate
  modified_base 6: mod_base = OTHER; note = 2'-deoxy-2'-fluorouridine-3'-phosphate
  modified_base 7: mod_base = OTHER; note = 2'-O-methyluridine-3'-phosphate
  modified_base 8: mod_base = OTHER; note = 2'-O-methylcytidine-3'-phosphate
  modified_base 9: mod_base = OTHER; note = 2'-O-methyluridine-3'-phosphate
  modified_base 10: mod_base = OTHER; note = 2'-O-methyluridine-3'-phosphate
  modified_base 11: mod_base = OTHER; note = 2'-O-methylguanosine-3'-phosphate
  modified_base 12: mod_base = OTHER; note = 2'-O-methylguanosine-3'-phosphate
  modified_base 13: mod_base = OTHER; note = 2'-O-methyladenosine-3'-phosphate
  modified_base 14: mod_base = OTHER; note = 2'-deoxy-2'-fluorouridine-3'-phosphate
  modified_base 15: mod_base = OTHER; note = 2'-O-methyluridine-3'-phosphate
  modified_base 16: mod_base = OTHER; note = 2'-deoxy-2'-fluorouridine-3'-phosphate
  modified_base 17: mod_base = OTHER; note = 2'-O-methylguanosine-3'-phosphate
  modified_base 18: mod_base = OTHER; note = 2'-O-methyluridine-3'-phosphate
  modified_base 19: mod_base = OTHER; note = 2'-O-methylcytidine-3'-phosphate
  modified_base 20: mod_base = OTHER; note = 2'-O-methylguanosine-3'-phosphate
  modified_base 21: mod_base = OTHER; note = 2'-O-methyluridine-3'-phosphate
  modified_base 22: mod_base = OTHER; note = 2'-O-methylguanosine-3'-phosphate
  modified_base 23: mod_base = OTHER; note = 2'-O-methyluridine
tagttttcttggatttgtcgtgt

SEQ ID NO: 5060 - RNA, 23 nt, synthetic construct
  source 1..23: mol_type = other RNA
  modified_base 1: mod_base = OTHER; note = 2'-O-methyluridine-3'-phosphate 5'phosphate
  modified_base 2: mod_base = OTHER; note = 2'-deoxy-2'-fluoroadenosine-3'-phosphate
  modified_base 3: mod_base = OTHER; note = 2'-O-methyladenosine-3'-phosphate
  modified_base 4: mod_base = OTHER; note = 2'-O-methylguanosine-3'-phosphate
  modified_base 5: mod_base = OTHER; note = 2'-O-methyluridine-3'-phosphate
  modified_base 6: mod_base = OTHER; note = 2'-deoxy-2'-fluorouridine-3'-phosphate
  modified_base 7: mod_base = OTHER; note = 2'-O-methyluridine-3'-phosphate
  modified_base 8: mod_base = OTHER; note = 2'-O-methyluridine-3'-phosphate
  modified_base 9: mod_base = OTHER; note = 2'-O-methylcytidine-3'-phosphate
  modified_base 10: mod_base = OTHER; note = 2'-O-methyluridine-3'-phosphate
  modified_base 11: mod_base = OTHER; note = 2'-O-methyluridine-3'-phosphate
  modified_base 12: mod_base = OTHER; note = 2'-O-methylguanosine-3'-phosphate
  modified_base 13: mod_base = OTHER; note = 2'-O-methylguanosine-3'-phosphate
  modified_base 14: mod_base = OTHER; note = 2'-deoxy-2'-fluoroadenosine-3'-phosphate
  modified_base 15: mod_base = OTHER; note = 2'-O-methyluridine-3'-phosphate
  modified_base 16: mod_base = OTHER; note = 2'-deoxy-2'-fluorouridine-3'-phosphate
  modified_base 17: mod_base = OTHER; note = 2'-O-methyluridine-3'-phosphate
  modified_base 18: mod_base = OTHER; note = 2'-O-methylguanosine-3'-phosphate
  modified_base 19: mod_base = OTHER; note = 2'-O-methyluridine-3'-phosphate
  modified_base 20: mod_base = OTHER; note = 2'-O-methylcytidine-3'-phosphate
  modified_base 21: mod_base = OTHER; note = 2'-O-methylguanosine-3'-phosphate
  modified_base 22: mod_base = OTHER; note = 2'-O-methyluridine-3'-phosphate
  modified_base 23: mod_base = OTHER; note = 2'-O-methylguanosine
taagttttcttggatttgtcgtg

SEQ ID NO: 5061 - RNA, 23 nt, synthetic construct
  source 1..23: mol_type = other RNA
  modified_base 1: mod_base = OTHER; note = 2'-O-methyluridine-3'-phosphate 5'phosphate
  modified_base 2: mod_base = OTHER; note = 2'-deoxy-2'-fluoroadenosine-3'-phosphate
  modified_base 3: mod_base = OTHER; note = 2'-O-methyladenosine-3'-phosphate
  modified_base 4: mod_base = OTHER; note = 2'-O-methyladenosine-3'-phosphate
  modified_base 5: mod_base = OTHER; note = 2'-O-methylguanosine-3'-phosphate
  modified_base 6: mod_base = OTHER; note = 2'-deoxy-2'-fluorouridine-3'-phosphate
  modified_base 7: mod_base = OTHER; note = 2'-O-methyluridine-3'-phosphate
  modified_base 8: mod_base = OTHER; note = 2'-O-methyluridine-3'-phosphate
  modified_base 9: mod_base = OTHER; note = 2'-O-methyluridine-3'-phosphate
  modified_base 10: mod_base = OTHER; note = 2'-O-methylcytidine-3'-phosphate
  modified_base 11: mod_base = OTHER; note = 2'-O-methyluridine-3'-phosphate
  modified_base 12: mod_base = OTHER; note = 2'-O-methyluridine-3'-phosphate
  modified_base 13: mod_base = OTHER; note = 2'-O-methylguanosine-3'-phosphate
  modified_base 14: mod_base = OTHER; note = 2'-deoxy-2'-fluoroguanosine-3'-phosphate
  modified_base 15: mod_base = OTHER; note = 2'-O-methyladenosine-3'-phosphate
  modified_base 16: mod_base = OTHER; note = 2'-deoxy-2'-fluorouridine-3'-phosphate
  modified_base 17: mod_base = OTHER; note = 2'-O-methyluridine-3'-phosphate
  modified_base 18: mod_base = OTHER; note = 2'-O-methyluridine-3'-phosphate
  modified_base 19: mod_base = OTHER; note = 2'-O-methylguanosine-3'-phosphate
  modified_base 20: mod_base = OTHER; note = 2'-O-methyluridine-3'-phosphate
  modified_base 21: mod_base = OTHER; note = 2'-O-methylcytidine-3'-phosphate
  modified_base 22: mod_base = OTHER; note = 2'-O-methylguanosine-3'-phosphate
  modified_base 23: mod_base = OTHER; note = 2'-O-methyluridine
taaagttttcttggatttgtcgt

SEQ ID NO: 5062 - RNA, 23 nt, synthetic construct
  source 1..23: mol_type = other RNA
  modified_base 1: mod_base = OTHER; note = 2'-O-methyluridine-3'-phosphate 5'phosphate
  modified_base 2: mod_base = OTHER; note = 2'-deoxy-2'-fluorouridine-3'-phosphate
  modified_base 3: mod_base = OTHER; note = 2'-O-methyladenosine-3'-phosphate
  modified_base 4: mod_base = OTHER; note = 2'-O-methyladenosine-3'-phosphate
  modified_base 5: mod_base = OTHER; note = 2'-O-methyladenosine-3'-phosphate
  modified_base 6: mod_base = OTHER; note = 2'-deoxy-2'-fluoroguanosine-3'-phosphate
  modified_base 7: mod_base = OTHER; note = 2'-O-methyluridine-3'-phosphate
  modified_base 8: mod_base = OTHER; note = 2'-O-methyluridine-3'-phosphate
  modified_base 9: mod_base = OTHER; note = 2'-O-methyluridine-3'-phosphate
  modified_base 10: mod_base = OTHER; note = 2'-O-methyluridine-3'-phosphate
  modified_base 11: mod_base = OTHER; note = 2'-O-methylcytidine-3'-phosphate
  modified_base 12: mod_base = OTHER; note = 2'-O-methyluridine-3'-phosphate
  modified_base 13: mod_base = OTHER; note = 2'-O-methyluridine-3'-phosphate
  modified_base 14: mod_base = OTHER; note = 2'-deoxy-2'-fluoroguanosine-3'-phosphate
  modified_base 15: mod_base = OTHER; note = 2'-O-methylguanosine-3'-phosphate
  modified_base 16: mod_base = OTHER; note = 2'-deoxy-2'-fluoroadenosine-3'-phosphate
  modified_base 17: mod_base = OTHER; note = 2'-O-methyluridine-3'-phosphate
  modified_base 18: mod_base = OTHER; note = 2'-O-methyluridine-3'-phosphate
  modified_base 19: mod_base = OTHER; note = 2'-O-methyluridine-3'-phosphate
  modified_base 20: mod_base = OTHER; note = 2'-O-methylguanosine-3'-phosphate
  modified_base 21: mod_base = OTHER; note = 2'-O-methyluridine-3'-phosphate
  modified_base 22: mod_base = OTHER; note = 2'-O-methylcytidine-3'-phosphate
  modified_base 23: mod_base = OTHER; note = 2'-O-methylguanosine
ttaaagttttcttggatttgtcg

SEQ ID NO: 5063 - RNA, 23 nt, synthetic construct
  source 1..23: mol_type = other RNA
  modified_base 1: mod_base = OTHER; note = 2'-O-methyluridine-3'-phosphate 5'phosphate
  modified_base 2: mod_base = OTHER; note = 2'-deoxy-2'-fluoroguanosine-3'-phosphate
  modified_base 3: mod_base = OTHER; note = 2'-O-methyluridine-3'-phosphate
  modified_base 4: mod_base = OTHER; note = 2'-O-methyladenosine-3'-phosphate
  modified_base 5: mod_base = OTHER; note = 2'-O-methyladenosine-3'-phosphate
  modified_base 6: mod_base = OTHER; note = 2'-deoxy-2'-fluoroadenosine-3'-phosphate
  modified_base 7: mod_base = OTHER; note = 2'-O-methylguanosine-3'-phosphate
  modified_base 8: mod_base = OTHER; note = 2'-O-methyluridine-3'-phosphate
  modified_base 9: mod_base = OTHER; note = 2'-O-methyluridine-3'-phosphate
  modified_base 10: mod_base = OTHER; note = 2'-O-methyluridine-3'-phosphate
  modified_base 11: mod_base = OTHER; note = 2'-O-methyluridine-3'-phosphate
  modified_base 12: mod_base = OTHER; note = 2'-O-methylcytidine-3'-phosphate
  modified_base 13: mod_base = OTHER; note = 2'-O-methyluridine-3'-phosphate
  modified_base 14: mod_base = OTHER; note = 2'-deoxy-2'-fluorouridine-3'-phosphate
  modified_base 15: mod_base = OTHER; note = 2'-O-methylguanosine-3'-phosphate
  modified_base 16: mod_base = OTHER; note = 2'-deoxy-2'-fluoroguanosine-3'-phosphate
  modified_base 17: mod_base = OTHER; note = 2'-O-methyladenosine-3'-phosphate
  modified_base 18: mod_base = OTHER; note = 2'-O-methyluridine-3'-phosphate
  modified_base 19: mod_base = OTHER; note = 2'-O-methyluridine-3'-phosphate
  modified_base 20: mod_base = OTHER; note = 2'-O-methyluridine-3'-phosphate
  modified_base 21: mod_base = OTHER; note = 2'-O-methylguanosine-3'-phosphate
  modified_base 22: mod_base = OTHER; note = 2'-O-methyluridine-3'-phosphate
  modified_base 23: mod_base = OTHER; note = 2'-O-methylcytidine
tgtaaagttttcttggatttgtc

SEQ ID NO: 5064 - RNA, 23 nt, synthetic construct
  source 1..23: mol_type = other RNA
  modified_base 1: mod_base = OTHER; note = 2'-O-methyluridine-3'-phosphate 5'phosphate
  modified_base 2: mod_base = OTHER; note = 2'-deoxy-2'-fluorocytidine-3'-phosphate
  modified_base 3: mod_base = OTHER; note = 2'-O-methylguanosine-3'-phosphate
  modified_base 4: mod_base = OTHER; note = 2'-O-methyluridine-3'-phosphate
  modified_base 5: mod_base = OTHER; note = 2'-O-methyladenosine-3'-phosphate
  modified_base 6: mod_base = OTHER; note = 2'-deoxy-2'-fluoroadenosine-3'-phosphate
  modified_base 7: mod_base = OTHER; note = 2'-O-methyladenosine-3'-phosphate
  modified_base 8: mod_base = OTHER; note = 2'-O-methylguanosine-3'-phosphate
  modified_base 9: mod_base = OTHER; note = 2'-O-methyluridine-3'-phosphate
  modified_base 10: mod_base = OTHER; note = 2'-O-methyluridine-3'-phosphate
  modified_base 11: mod_base = OTHER; note = 2'-O-methyluridine-3'-phosphate
  modified_base 12: mod_base = OTHER; note = 2'-O-methyluridine-3'-phosphate
  modified_base 13: mod_base = OTHER; note = 2'-O-methylcytidine-3'-phosphate
  modified_base 14: mod_base = OTHER; note = 2'-deoxy-2'-fluorouridine-3'-phosphate
  modified_base 15: mod_base = OTHER; note = 2'-O-methyluridine-3'-phosphate
  modified_base 16: mod_base = OTHER; note = 2'-deoxy-2'-fluoroguanosine-3'-phosphate
  modified_base 17: mod_base = OTHER; note = 2'-O-methylguanosine-3'-phosphate
  modified_base 18: mod_base = OTHER; note = 2'-O-methyladenosine-3'-phosphate
  modified_base 19: mod_base = OTHER; note = 2'-O-methyluridine-3'-phosphate
  modified_base 20: mod_base = OTHER; note = 2'-O-methyluridine-3'-phosphate
  modified_base 21: mod_base = OTHER; note = 2'-O-methyluridine-3'-phosphate
  modified_base 22: mod_base = OTHER; note = 2'-O-methylguanosine-3'-phosphate
  modified_base 23: mod_base = OTHER; note = 2'-O-methyluridine
tcgtaaagttttcttggatttgt

SEQ ID NO: 5065 - RNA, 23 nt, synthetic construct
  source 1..23: mol_type = other RNA
  modified_base 1: mod_base = OTHER; note = 2'-O-methyluridine-3'-phosphate 5'phosphate
  modified_base 2: mod_base = OTHER; note = 2'-deoxy-2'-fluorouridine-3'-phosphate
  modified_base 3: mod_base = OTHER; note = 2'-O-methylcytidine-3'-phosphate
  modified_base 4: mod_base = OTHER; note = 2'-O-methylguanosine-3'-phosphate
  modified_base 5: mod_base = OTHER; note = 2'-O-methyluridine-3'-phosphate
  modified_base 6: mod_base = OTHER; note = 2'-deoxy-2'-fluoroadenosine-3'-phosphate
  modified_base 7: mod_base = OTHER; note = 2'-O-methyladenosine-3'-phosphate
  modified_base 8: mod_base = OTHER; note = 2'-O-methyladenosine-3'-phosphate
  modified_base 9: mod_base = OTHER; note = 2'-O-methylguanosine-3'-phosphate
  modified_base 10: mod_base = OTHER; note = 2'-O-methyluridine-3'-phosphate
  modified_base 11: mod_base = OTHER; note = 2'-O-methyluridine-3'-phosphate
  modified_base 12: mod_base = OTHER; note = 2'-O-methyluridine-3'-phosphate
  modified_base 13: mod_base = OTHER; note = 2'-O-methyluridine-3'-phosphate
  modified_base 14: mod_base = OTHER; note = 2'-deoxy-2'-fluorocytidine-3'-phosphate
  modified_base 15: mod_base = OTHER; note = 2'-O-methyluridine-3'-phosphate
  modified_base 16: mod_base = OTHER; note = 2'-deoxy-2'-fluorouridine-3'-phosphate
  modified_base 17: mod_base = OTHER; note = 2'-O-methylguanosine-3'-phosphate
  modified_base 18: mod_base = OTHER; note = 2'-O-methylguanosine-3'-phosphate
  modified_base 19: mod_base = OTHER; note = 2'-O-methyladenosine-3'-phosphate
  modified_base 20: mod_base = OTHER; note = 2'-O-methyluridine-3'-phosphate
  modified_base 21: mod_base = OTHER; note = 2'-O-methyluridine-3'-phosphate
  modified_base 22: mod_base = OTHER; note = 2'-O-methyluridine-3'-phosphate
  modified_base 23: mod_base = OTHER; note = 2'-O-methylguanosine
ttcgtaaagttttcttggatttg

SEQ ID NO: 5066 - RNA, 23 nt, synthetic construct
  source 1..23: mol_type = other RNA
  modified_base 1: mod_base = OTHER; note = 2'-O-methyluridine-3'-phosphate 5'phosphate
  modified_base 2: mod_base = OTHER; note = 2'-deoxy-2'-fluoroguanosine-3'-phosphate
  modified_base 3: mod_base = OTHER; note = 2'-O-methyluridine-3'-phosphate
  modified_base 4: mod_base = OTHER; note = 2'-O-methylcytidine-3'-phosphate
  modified_base 5: mod_base = OTHER; note = 2'-O-methylguanosine-3'-phosphate
  modified_base 6: mod_base = OTHER; note = 2'-deoxy-2'-fluorouridine-3'-phosphate
  modified_base 7: mod_base = OTHER; note = 2'-O-methyladenosine-3'-phosphate
  modified_base 8: mod_base = OTHER; note = 2'-O-methyladenosine-3'-phosphate
  modified_base 9: mod_base = OTHER; note = 2'-O-methyladenosine-3'-phosphate
  modified_base 10: mod_base = OTHER; note = 2'-O-methylguanosine-3'-phosphate
  modified_base 11: mod_base = OTHER; note = 2'-O-methyluridine-3'-phosphate
  modified_base 12: mod_base = OTHER; note = 2'-O-methyluridine-3'-phosphate
  modified_base 13: mod_base = OTHER; note = 2'-O-methyluridine-3'-phosphate
  modified_base 14: mod_base = OTHER; note = 2'-deoxy-2'-fluorouridine-3'-phosphate
  modified_base 15: mod_base = OTHER; note = 2'-O-methylcytidine-3'-phosphate
  modified_base 16: mod_base = OTHER; note = 2'-deoxy-2'-fluorouridine-3'-phosphate
  modified_base 17: mod_base = OTHER; note = 2'-O-methyluridine-3'-phosphate
  modified_base 18: mod_base = OTHER; note = 2'-O-methylguanosine-3'-phosphate
  modified_base 19: mod_base = OTHER; note = 2'-O-methylguanosine-3'-phosphate
  modified_base 20: mod_base = OTHER; note = 2'-O-methyladenosine-3'-phosphate
  modified_base 21: mod_base = OTHER; note = 2'-O-methyluridine-3'-phosphate
  modified_base 22: mod_base = OTHER; note = 2'-O-methyluridine-3'-phosphate
  modified_base 23: mod_base = OTHER; note = 2'-O-methyluridine
tgtcgtaaagttttcttggattt

SEQ ID NO: 5067 - RNA, 23 nt, synthetic construct
  source 1..23: mol_type = other RNA
  modified_base 1: mod_base = OTHER; note = 2'-O-methyluridine-3'-phosphate 5'phosphate
  modified_base 2: mod_base = OTHER; note = 2'-deoxy-2'-fluoroadenosine-3'-phosphate
  modified_base 3: mod_base = OTHER; note = 2'-O-methylguanosine-3'-phosphate
  modified_base 4: mod_base = OTHER; note = 2'-O-methyluridine-3'-phosphate
  modified_base 5: mod_base = OTHER; note = 2'-O-methylcytidine-3'-phosphate
  modified_base 6: mod_base = OTHER; note = 2'-deoxy-2'-fluoroguanosine-3'-phosphate
  modified_base 7: mod_base = OTHER; note = 2'-O-methyluridine-3'-phosphate
  modified_base 8: mod_base = OTHER; note = 2'-O-methyladenosine-3'-phosphate
  modified_base 9: mod_base = OTHER; note = 2'-O-methyladenosine-3'-phosphate
  modified_base 10: mod_base = OTHER; note = 2'-O-methyladenosine-3'-phosphate
  modified_base 11: mod_base = OTHER; note = 2'-O-methylguanosine-3'-phosphate
  modified_base 12: mod_base = OTHER; note = 2'-O-methyluridine-3'-phosphate
  modified_base 13: mod_base = OTHER; note = 2'-O-methyluridine-3'-phosphate
  modified_base 14: mod_base = OTHER; note = 2'-deoxy-2'-fluorouridine-3'-phosphate
  modified_base 15: mod_base = OTHER; note = 2'-O-methyluridine-3'-phosphate
  modified_base 16: mod_base = OTHER; note = 2'-deoxy-2'-fluorocytidine-3'-phosphate
  modified_base 17: mod_base = OTHER; note = 2'-O-methyluridine-3'-phosphate
  modified_base 18: mod_base = OTHER; note = 2'-O-methyluridine-3'-phosphate
  modified_base 19: mod_base = OTHER; note = 2'-O-methylguanosine-3'-phosphate
  modified_base 20: mod_base = OTHER; note = 2'-O-methylguanosine-3'-phosphate
  modified_base 21: mod_base = OTHER; note = 2'-O-methyladenosine-3'-phosphate
  modified_base 22: mod_base = OTHER; note = 2'-O-methyluridine-3'-phosphate
  modified_base 23: mod_base = OTHER; note = 2'-O-methyluridine
tagtcgtaaagttttcttggatt

SEQ ID NO: 5068 - RNA, 23 nt, synthetic construct
  source 1..23: mol_type = other RNA
  modified_base 1: mod_base = OTHER; note = 2'-O-methyluridine-3'-phosphate 5'phosphate
  modified_base 2: mod_base = OTHER; note = 2'-deoxy-2'-fluorouridine-3'-phosphate
  modified_base 3: mod_base = OTHER; note = 2'-O-methyladenosine-3'-phosphate
  modified_base 4: mod_base = OTHER; note = 2'-O-methylguanosine-3'-phosphate
  modified_base 5: mod_base = OTHER; note = 2'-O-methyluridine-3'-phosphate
  modified_base 6: mod_base = OTHER; note = 2'-deoxy-2'-fluorocytidine-3'-phosphate
  modified_base 7: mod_base = OTHER; note = 2'-O-methylguanosine-3'-phosphate
  modified_base 8: mod_base = OTHER; note = 2'-O-methyluridine-3'-phosphate
  modified_base 9: mod_base = OTHER; note = 2'-O-methyladenosine-3'-phosphate
  modified_base 10: mod_base = OTHER; note = 2'-O-methyladenosine-3'-phosphate
  modified_base 11: mod_base = OTHER; note = 2'-O-methyladenosine-3'-phosphate
  modified_base 12: mod_base = OTHER; note = 2'-O-methylguanosine-3'-phosphate
  modified_base 13: mod_base = OTHER; note = 2'-O-methyluridine-3'-phosphate
  modified_base 14: mod_base = OTHER; note = 2'-deoxy-2'-fluorouridine-3'-phosphate
  modified_base 15: mod_base = OTHER; note = 2'-O-methyluridine-3'-phosphate
  modified_base 16: mod_base = OTHER; note = 2'-deoxy-2'-fluorouridine-3'-phosphate
  modified_base 17: mod_base = OTHER; note = 2'-O-methylcytidine-3'-phosphate
  modified_base 18: mod_base = OTHER; note = 2'-O-methyluridine-3'-phosphate
  modified_base 19: mod_base = OTHER; note = 2'-O-methyluridine-3'-phosphate
  modified_base 20: mod_base = OTHER; note = 2'-O-methylguanosine-3'-phosphate
  modified_base 21: mod_base = OTHER; note = 2'-O-methylguanosine-3'-phosphate
  modified_base 22: mod_base = OTHER; note = 2'-O-methyladenosine-3'-phosphate
  modified_base 23: mod_base = OTHER; note = 2'-O-methyluridine
ttagtcgtaaagttttcttggat

SEQ ID NO: 5069 - RNA, 23 nt, synthetic construct
  source 1..23: mol_type = other RNA
  modified_base 1: mod_base = OTHER; note = 2'-O-methyluridine-3'-phosphate 5'phosphate
  modified_base 2: mod_base = OTHER; note = 2'-deoxy-2'-fluoroadenosine-3'-phosphate
  modified_base 3: mod_base = OTHER; note = 2'-O-methylguanosine-3'-phosphate
  modified_base 4: mod_base = OTHER; note = 2'-O-methyluridine-3'-phosphate
  modified_base 5: mod_base = OTHER; note = 2'-O-methyladenosine-3'-phosphate
  modified_base 6: mod_base = OTHER; note = 2'-deoxy-2'-fluoroguanosine-3'-phosphate
  modified_base 7: mod_base = OTHER; note = 2'-O-methyluridine-3'-phosphate
  modified_base 8: mod_base = OTHER; note = 2'-O-methylcytidine-3'-phosphate
  modified_base 9: mod_base = OTHER; note = 2'-O-methylguanosine-3'-phosphate
  modified_base 10: mod_base = OTHER; note = 2'-O-methyluridine-3'-phosphate
  modified_base 11: mod_base = OTHER; note = 2'-O-methyladenosine-3'-phosphate
  modified_base 12: mod_base = OTHER; note = 2'-O-methyladenosine-3'-phosphate
  modified_base 13: mod_base = OTHER; note = 2'-O-methyladenosine-3'-phosphate
  modified_base 14: mod_base = OTHER; note = 2'-deoxy-2'-fluoroguanosine-3'-phosphate
  modified_base 15: mod_base = OTHER; note = 2'-O-methyluridine-3'-phosphate
  modified_base 16: mod_base = OTHER; note = 2'-deoxy-2'-fluorouridine-3'-phosphate
  modified_base 17: mod_base = OTHER; note = 2'-O-methyluridine-3'-phosphate
  modified_base 18: mod_base = OTHER; note = 2'-O-methyluridine-3'-phosphate
  modified_base 19: mod_base = OTHER; note = 2'-O-methylcytidine-3'-phosphate
  modified_base 20: mod_base = OTHER; note = 2'-O-methyluridine-3'-phosphate
  modified_base 21: mod_base = OTHER; note = 2'-O-methyluridine-3'-phosphate
  modified_base 22: mod_base = OTHER; note = 2'-O-methylguanosine-3'-phosphate
  modified_base 23: mod_base = OTHER; note = 2'-O-methylguanosine
tagtagtcgtaaagttttcttgg

SEQ ID NO: 5070 - RNA, 23 nt, synthetic construct
  source 1..23: mol_type = other RNA
  modified_base 1: mod_base = OTHER; note = 2'-O-methyluridine-3'-phosphate 5'phosphate
  modified_base 2: mod_base = OTHER; note = 2'-deoxy-2'-fluorocytidine-3'-phosphate
  modified_base 3: mod_base = OTHER; note = 2'-O-methyladenosine-3'-phosphate
  modified_base 4: mod_base = OTHER; note = 2'-O-methylguanosine-3'-phosphate
  modified_base 5: mod_base = OTHER; note = 2'-O-methyluridine-3'-phosphate
  modified_base 6: mod_base = OTHER; note = 2'-deoxy-2'-fluoroadenosine-3'-phosphate
  modified_base 7: mod_base = OTHER; note = 2'-O-methylguanosine-3'-phosphate
  modified_base 8: mod_base = OTHER; note = 2'-O-methyluridine-3'-phosphate
  modified_base 9: mod_base = OTHER; note = 2'-O-methylcytidine-3'-phosphate
  modified_base 10: mod_base = OTHER; note = 2'-O-methylguanosine-3'-phosphate
  modified_base 11: mod_base = OTHER; note = 2'-O-methyluridine-3'-phosphate
  modified_base 12: mod_base = OTHER; note = 2'-O-methyladenosine-3'-phosphate
  modified_base 13: mod_base = OTHER; note = 2'-O-methyladenosine-3'-phosphate
  modified_base 14: mod_base = OTHER; note = 2'-deoxy-2'-fluoroadenosine-3'-phosphate
  modified_base 15: mod_base = OTHER; note = 2'-O-methylguanosine-3'-phosphate
  modified_base 16: mod_base = OTHER; note = 2'-deoxy-2'-fluorouridine-3'-phosphate
  modified_base 17: mod_base = OTHER; note = 2'-O-methyluridine-3'-phosphate
  modified_base 18: mod_base = OTHER; note = 2'-O-methyluridine-3'-phosphate
  modified_base 19: mod_base = OTHER; note = 2'-O-methyluridine-3'-phosphate
  modified_base 20: mod_base = OTHER; note = 2'-O-methylcytidine-3'-phosphate
  modified_base 21: mod_base = OTHER; note = 2'-O-methyluridine-3'-phosphate
  modified_base 22: mod_base = OTHER; note = 2'-O-methyluridine-3'-phosphate
  modified_base 23: mod_base = OTHER; note = 2'-O-methylguanosine
tcagtagtcgtaaagttttcttg

SEQ ID NO: 5071 - RNA, 23 nt, synthetic construct
  source 1..23: mol_type = other RNA
  modified_base 1: mod_base = OTHER; note = 2'-O-methyluridine-3'-phosphate 5'phosphate
  modified_base 2: mod_base = OTHER; note = 2'-deoxy-2'-fluoroadenosine-3'-phosphate
  modified_base 3: mod_base = OTHER; note = 2'-O-methylcytidine-3'-phosphate
  modified_base 4: mod_base = OTHER; note = 2'-O-methyladenosine-3'-phosphate
  modified_base 5: mod_base = OTHER; note = 2'-O-methylguanosine-3'-phosphate
  modified_base 6: mod_base = OTHER; note = 2'-deoxy-2'-fluorouridine-3'-phosphate
  modified_base 7: mod_base = OTHER; note = 2'-O-methyladenosine-3'-phosphate
  modified_base 8: mod_base = OTHER; note = 2'-O-methylguanosine-3'-phosphate
  modified_base 9: mod_base = OTHER; note = 2'-O-methyluridine-3'-phosphate
  modified_base 10: mod_base = OTHER; note = 2'-O-methylcytidine-3'-phosphate
  modified_base 11: mod_base = OTHER; note = 2'-O-methylguanosine-3'-phosphate
  modified_base 12: mod_base = OTHER; note = 2'-O-methyluridine-3'-phosphate
  modified_base 13: mod_base = OTHER; note = 2'-O-methyladenosine-3'-phosphate
  modified_base 14: mod_base = OTHER; note = 2'-deoxy-2'-fluoroadenosine-3'-phosphate
  modified_base 15: mod_base = OTHER; note = 2'-O-methyladenosine-3'-phosphate
  modified_base 16: mod_base = OTHER; note = 2'-deoxy-2'-fluoroguanosine-3'-phosphate
  modified_base 17: mod_base = OTHER; note = 2'-O-methyluridine-3'-phosphate
  modified_base 18: mod_base = OTHER; note = 2'-O-methyluridine-3'-phosphate
  modified_base 19: mod_base = OTHER; note = 2'-O-methyluridine-3'-phosphate
  modified_base 20: mod_base = OTHER; note = 2'-O-methyluridine-3'-phosphate
  modified_base 21: mod_base = OTHER; note = 2'-O-methylcytidine-3'-phosphate
  modified_base 22: mod_base = OTHER; note = 2'-O-methyluridine-3'-phosphate
  modified_base 23: mod_base = OTHER; note = 2'-O-methyluridine
tacagtagtcgtaaagttttctt

SEQ ID NO: 5072 - RNA, 23 nt, synthetic construct
  source 1..23: mol_type = other RNA
  modified_base 1: mod_base = OTHER; note = 2'-O-methyluridine-3'-phosphate 5'phosphate
  modified_base 2: mod_base = OTHER; note = 2'-deoxy-2'-fluorocytidine-3'-phosphate
  modified_base 3: mod_base = OTHER; note = 2'-O-methyladenosine-3'-phosphate
  modified_base 4: mod_base = OTHER; note = 2'-O-methylcytidine-3'-phosphate
  modified_base 5: mod_base = OTHER; note = 2'-O-methyladenosine-3'-phosphate
  modified_base 6: mod_base = OTHER; note = 2'-deoxy-2'-fluoroguanosine-3'-phosphate
  modified_base 7: mod_base = OTHER; note = 2'-O-methyluridine-3'-phosphate
  modified_base 8: mod_base = OTHER; note = 2'-O-methyladenosine-3'-phosphate
  modified_base 9: mod_base = OTHER; note = 2'-O-methylguanosine-3'-phosphate
  modified_base 10: mod_base = OTHER; note = 2'-O-methyluridine-3'-phosphate
  modified_base 11: mod_base = OTHER; note = 2'-O-methylcytidine-3'-phosphate
  modified_base 12: mod_base = OTHER; note = 2'-O-methylguanosine-3'-phosphate
  modified_base 13: mod_base = OTHER; note = 2'-O-methyluridine-3'-phosphate
  modified_base 14: mod_base = OTHER; note = 2'-deoxy-2'-fluoroadenosine-3'-phosphate
  modified_base 15: mod_base = OTHER; note = 2'-O-methyladenosine-3'-phosphate
  modified_base 16: mod_base = OTHER; note = 2'-deoxy-2'-fluoroadenosine-3'-phosphate
  modified_base 17: mod_base = OTHER; note = 2'-O-methylguanosine-3'-phosphate
  modified_base 18: mod_base = OTHER; note = 2'-O-methyluridine-3'-phosphate
  modified_base 19: mod_base = OTHER; note = 2'-O-methyluridine-3'-phosphate
  modified_base 20: mod_base = OTHER; note = 2'-O-methyluridine-3'-phosphate
  modified_base 21: mod_base = OTHER; note = 2'-O-methyluridine-3'-phosphate
  modified_base 22: mod_base = OTHER; note = 2'-O-methylcytidine-3'-phosphate
  modified_base 23: mod_base = OTHER; note = 2'-O-methyluridine
tcacagtagtcgtaaagttttct

SEQ ID NO: 5073 - RNA, 23 nt, synthetic construct
  source 1..23: mol_type = other RNA
  modified_base 1: mod_base = OTHER; note = 2'-O-methyluridine-3'-phosphate 5'phosphate
  modified_base 2: mod_base = OTHER; note = 2'-deoxy-2'-fluorouridine-3'-phosphate
  modified_base 3: mod_base = OTHER; note = 2'-O-methylcytidine-3'-phosphate
  modified_base 4: mod_base = OTHER; note = 2'-O-methyladenosine-3'-phosphate
  modified_base 5: mod_base = OTHER; note = 2'-O-methylcytidine-3'-phosphate
  modified_base 6: mod_base = OTHER; note = 2'-deoxy-2'-fluoroadenosine-3'-phosphate
  modified_base 7: mod_base = OTHER; note = 2'-O-methylguanosine-3'-phosphate
  modified_base 8: mod_base = OTHER; note = 2'-O-methyluridine-3'-phosphate
  modified_base 9: mod_base = OTHER; note = 2'-O-methyladenosine-3'-phosphate
  modified_base 10: mod_base = OTHER; note = 2'-O-methylguanosine-3'-phosphate
  modified_base 11: mod_base = OTHER; note = 2'-O-methyluridine-3'-phosphate
  modified_base 12: mod_base = OTHER; note = 2'-O-methylcytidine-3'-phosphate
  modified_base 13: mod_base = OTHER; note = 2'-O-methylguanosine-3'-phosphate
  modified_base 14: mod_base = OTHER; note = 2'-deoxy-2'-fluorouridine-3'-phosphate
  modified_base 15: mod_base = OTHER; note = 2'-O-methyladenosine-3'-phosphate
  modified_base 16: mod_base = OTHER; note = 2'-deoxy-2'-fluoroadenosine-3'-phosphate
  modified_base 17: mod_base = OTHER; note = 2'-O-methyladenosine-3'-phosphate
  modified_base 18: mod_base = OTHER; note = 2'-O-methylguanosine-3'-phosphate
  modified_base 19: mod_base = OTHER; note = 2'-O-methyluridine-3'-phosphate
  modified_base 20: mod_base = OTHER; note = 2'-O-methyluridine-3'-phosphate
  modified_base 21: mod_base = OTHER; note = 2'-O-methyluridine-3'-phosphate
  modified_base 22: mod_base = OTHER; note = 2'-O-methyluridine-3'-phosphate
  modified_base 23: mod_base = OTHER; note = 2'-O-methylcytidine
ttcacagtagtcgtaaagttttc

SEQ ID NO: 5074 - RNA, 23 nt, synthetic construct
  source 1..23: mol_type = other RNA
  modified_base 1: mod_base = OTHER; note = 2'-O-methyluridine-3'-phosphate 5'phosphate
  modified_base 2: mod_base = OTHER; note = 2'-deoxy-2'-fluoroadenosine-3'-phosphate
  modified_base 3: mod_base = OTHER; note = 2'-O-methyluridine-3'-phosphate
  modified_base 4: mod_base = OTHER; note = 2'-O-methylcytidine-3'-phosphate
  modified_base 5: mod_base = OTHER; note = 2'-O-methyladenosine-3'-phosphate
  modified_base 6: mod_base = OTHER; note = 2'-deoxy-2'-fluorocytidine-3'-phosphate
  modified_base 7: mod_base = OTHER; note = 2'-O-methyladenosine-3'-phosphate
  modified_base 8: mod_base = OTHER; note = 2'-O-methylguanosine-3'-phosphate
  modified_base 9: mod_base = OTHER; note = 2'-O-methyluridine-3'-phosphate
  modified_base 10: mod_base = OTHER; note = 2'-O-methyladenosine-3'-phosphate
  modified_base 11: mod_base = OTHER; note = 2'-O-methylguanosine-3'-phosphate
  modified_base 12: mod_base = OTHER; note = 2'-O-methyluridine-3'-phosphate
  modified_base 13: mod_base = OTHER; note = 2'-O-methylcytidine-3'-phosphate
  modified_base 14: mod_base = OTHER; note = 2'-deoxy-2'-fluoroguanosine-3'-phosphate
  modified_base 15: mod_base = OTHER; note = 2'-O-methyluridine-3'-phosphate
  modified_base 16: mod_base = OTHER; note = 2'-deoxy-2'-fluoroadenosine-3'-phosphate
  modified_base 17: mod_base = OTHER; note = 2'-O-methyladenosine-3'-phosphate
  modified_base 18: mod_base = OTHER; note = 2'-O-methyladenosine-3'-phosphate
  modified_base 19: mod_base = OTHER; note = 2'-O-methylguanosine-3'-phosphate
  modified_base 20: mod_base = OTHER; note = 2'-O-methyluridine-3'-phosphate
  modified_base 21: mod_base = OTHER; note = 2'-O-methyluridine-3'-phosphate
  modified_base 22: mod_base = OTHER; note = 2'-O-methyluridine-3'-phosphate
  modified_base 23: mod_base = OTHER; note = 2'-O-methyluridine
tatcacagtagtcgtaaagtttt

SEQ ID NO: 5075 - RNA, 23 nt, synthetic construct
  source 1..23: mol_type = other RNA
  modified_base 1: mod_base = OTHER; note = 2'-O-methyluridine-3'-phosphate 5'phosphate
  modified_base 2: mod_base = OTHER; note = 2'-deoxy-2'-fluorocytidine-3'-phosphate
  modified_base 3: mod_base = OTHER; note = 2'-O-methyladenosine-3'-phosphate
  modified_base 4: mod_base = OTHER; note = 2'-O-methyluridine-3'-phosphate
  modified_base 5: mod_base = OTHER; note = 2'-O-methylcytidine-3'-phosphate
  modified_base 6: mod_base = OTHER; note = 2'-deoxy-2'-fluoroadenosine-3'-phosphate
  modified_base 7: mod_base = OTHER; note = 2'-O-methylcytidine-3'-phosphate
  modified_base 8: mod_base = OTHER; note = 2'-O-methyladenosine-3'-phosphate
  modified_base 9: mod_base = OTHER; note = 2'-O-methylguanosine-3'-phosphate
  modified_base 10: mod_base = OTHER; note = 2'-O-methyluridine-3'-phosphate
  modified_base 11: mod_base = OTHER; note = 2'-O-methyladenosine-3'-phosphate
  modified_base 12: mod_base = OTHER; note = 2'-O-methylguanosine-3'-phosphate
  modified_base 13: mod_base = OTHER; note = 2'-O-methyluridine-3'-phosphate
  modified_base 14: mod_base = OTHER; note = 2'-deoxy-2'-fluorocytidine-3'-phosphate
  modified_base 15: mod_base = OTHER; note = 2'-O-methylguanosine-3'-phosphate
  modified_base 16: mod_base = OTHER; note = 2'-deoxy-2'-fluorouridine-3'-phosphate
  modified_base 17: mod_base = OTHER; note = 2'-O-methyladenosine-3'-phosphate
  modified_base 18: mod_base = OTHER; note = 2'-O-methyladenosine-3'-phosphate
  modified_base 19: mod_base = OTHER; note = 2'-O-methyladenosine-3'-phosphate
  modified_base 20: mod_base = OTHER; note = 2'-O-methylguanosine-3'-phosphate
  modified_base 21: mod_base = OTHER; note = 2'-O-methyluridine-3'-phosphate
  modified_base 22: mod_base = OTHER; note = 2'-O-methyluridine-3'-phosphate
  modified_base 23: mod_base = OTHER; note = 2'-O-methyluridine
tcatcacagtagtcgtaaagttt

SEQ ID NO: 5076 - RNA, 23 nt, synthetic construct
  source 1..23: mol_type = other RNA
  modified_base 1: mod_base = OTHER; note = 2'-O-methyluridine-3'-phosphate 5'phosphate
  modified_base 2: mod_base = OTHER; note = 2'-deoxy-2'-fluoroadenosine-3'-phosphate
  modified_base 3: mod_base = OTHER; note = 2'-O-methylcytidine-3'-phosphate
  modified_base 4: mod_base = OTHER; note = 2'-O-methyladenosine-3'-phosphate
  modified_base 5: mod_base = OTHER; note = 2'-O-methyluridine-3'-phosphate
  modified_base 6: mod_base = OTHER; note = 2'-deoxy-2'-fluorocytidine-3'-phosphate
  modified_base 7: mod_base = OTHER; note = 2'-O-methyladenosine-3'-phosphate
  modified_base 8: mod_base = OTHER; note = 2'-O-methylcytidine-3'-phosphate
  modified_base 9: mod_base = OTHER; note = 2'-O-methyladenosine-3'-phosphate
  modified_base 10: mod_base = OTHER; note = 2'-O-methylguanosine-3'-phosphate
  modified_base 11: mod_base = OTHER; note = 2'-O-methyluridine-3'-phosphate
  modified_base 12: mod_base = OTHER; note = 2'-O-methyladenosine-3'-phosphate
  modified_base 13: mod_base = OTHER; note = 2'-O-methylguanosine-3'-phosphate
  modified_base 14: mod_base = OTHER; note = 2'-deoxy-2'-fluorouridine-3'-phosphate
  modified_base 15: mod_base = OTHER; note = 2'-O-methylcytidine-3'-phosphate
  modified_base 16: mod_base = OTHER; note = 2'-deoxy-2'-fluoroguanosine-3'-phosphate
  modified_base 17: mod_base = OTHER; note = 2'-O-methyluridine-3'-phosphate
  modified_base 18: mod_base = OTHER; note = 2'-O-methyladenosine-3'-phosphate
  modified_base 19: mod_base = OTHER; note = 2'-O-methyladenosine-3'-phosphate
  modified_base 20: mod_base = OTHER; note = 2'-O-methyladenosine-3'-phosphate
  modified_base 21: mod_base = OTHER; note = 2'-O-methylguanosine-3'-phosphate
  modified_base 22: mod_base = OTHER; note = 2'-O-methyluridine-3'-phosphate
  modified_base 23: mod_base = OTHER; note = 2'-O-methyluridine
tacatcacagtagtcgtaaagtt

SEQ ID NO: 5077 - RNA, 23 nt, synthetic construct
  source 1..23: mol_type = other RNA
  modified_base 1: mod_base = OTHER; note = 2'-O-methyluridine-3'-phosphate 5'phosphate
  modified_base 2: mod_base = OTHER; note = 2'-deoxy-2'-fluoroguanosine-3'-phosphate
  modified_base 3: mod_base = OTHER; note = 2'-O-methyladenosine-3'-phosphate
  modified_base 4: mod_base = OTHER; note = 2'-O-methylcytidine-3'-phosphate
  modified_base 5: mod_base = OTHER; note = 2'-O-methyladenosine-3'-phosphate
  modified_base 6: mod_base = OTHER; note = 2'-deoxy-2'-fluorouridine-3'-phosphate
  modified_base 7: mod_base = OTHER; note = 2'-O-methylcytidine-3'-phosphate
  modified_base 8: mod_base = OTHER; note = 2'-O-methyladenosine-3'-phosphate
  modified_base 9: mod_base = OTHER; note = 2'-O-methylcytidine-3'-phosphate
  modified_base 10: mod_base = OTHER; note = 2'-O-methyladenosine-3'-phosphate
  modified_base 11: mod_base = OTHER; note = 2'-O-methylguanosine-3'-phosphate
  modified_base 12: mod_base = OTHER; note = 2'-O-methyluridine-3'-phosphate
  modified_base 13: mod_base = OTHER; note = 2'-O-methyladenosine-3'-phosphate
  modified_base 14: mod_base = OTHER; note = 2'-deoxy-2'-fluoroguanosine-3'-phosphate
  modified_base 15: mod_base = OTHER; note = 2'-O-methyluridine-3'-phosphate
  modified_base 16: mod_base = OTHER; note = 2'-deoxy-2'-fluorocytidine-3'-phosphate
  modified_base 17: mod_base = OTHER; note = 2'-O-methylguanosine-3'-phosphate
  modified_base 18: mod_base = OTHER; note = 2'-O-methyluridine-3'-phosphate
  modified_base 19: mod_base = OTHER; note = 2'-O-methyladenosine-3'-phosphate
  modified_base 20: mod_base = OTHER; note = 2'-O-methyladenosine-3'-phosphate
  modified_base 21: mod_base = OTHER; note = 2'-O-methyladenosine-3'-phosphate
  modified_base 22: mod_base = OTHER; note = 2'-O-methylguanosine-3'-phosphate
  modified_base 23: mod_base = OTHER; note = 2'-O-methyluridine
tgacatcacagtagtcgtaaagt

SEQ ID NO: 5078 - RNA, 23 nt, synthetic construct
  source 1..23: mol_type = other RNA
  modified_base 1: mod_base = OTHER; note = 2'-O-methyluridine-3'-phosphate 5'phosphate
  modified_base 2: mod_base = OTHER; note = 2'-deoxy-2'-fluorouridine-3'-phosphate
  modified_base 3: mod_base = OTHER; note = 2'-O-methylguanosine-3'-phosphate
  modified_base 4: mod_base = OTHER; note = 2'-O-methyladenosine-3'-phosphate
  modified_base 5: mod_base = OTHER; note = 2'-O-methylguanosine-3'-phosphate
  modified_base 6: mod_base = OTHER; note = 2'-deoxy-2'-fluoroguanosine-3'-phosphate
  modified_base 7: mod_base = OTHER; note = 2'-O-methylguanosine-3'-phosphate
  modified_base 8: mod_base = OTHER; note = 2'-O-methyladenosine-3'-phosphate
  modified_base 9: mod_base = OTHER; note = 2'-O-methylcytidine-3'-phosphate
  modified_base 10: mod_base = OTHER; note = 2'-O-methyladenosine-3'-phosphate
  modified_base 11: mod_base = OTHER; note = 2'-O-methyluridine-3'-phosphate
  modified_base 12: mod_base = OTHER; note = 2'-O-methylcytidine-3'-phosphate
  modified_base 13: mod_base = OTHER; note = 2'-O-methyladenosine-3'-phosphate
  modified_base 14: mod_base = OTHER; note = 2'-deoxy-2'-fluorocytidine-3'-phosphate
  modified_base 15: mod_base = OTHER; note = 2'-O-methyladenosine-3'-phosphate
  modified_base 16: mod_base = OTHER; note = 2'-deoxy-2'-fluoroguanosine-3'-phosphate
  modified_base 17: mod_base = OTHER; note = 2'-O-methyluridine-3'-phosphate
  modified_base 18: mod_base = OTHER; note = 2'-O-methyladenosine-3'-phosphate
  modified_base 19: mod_base = OTHER; note = 2'-O-methylguanosine-3'-phosphate
  modified_base 20: mod_base = OTHER; note = 2'-O-methyluridine-3'-phosphate
  modified_base 21: mod_base = OTHER; note = 2'-O-methylcytidine-3'-phosphate
  modified_base 22: mod_base = OTHER; note = 2'-O-methylguanosine-3'-phosphate
  modified_base 23: mod_base = OTHER; note = 2'-O-methyluridine
ttgagggacatcacagtagtcgt

SEQ ID NO: 5079 - RNA, 23 nt, synthetic construct
  source 1..23: mol_type = other RNA
  modified_base 1: mod_base = OTHER; note = 2'-O-methyluridine-3'-phosphate 5'phosphate
  modified_base 2: mod_base = OTHER; note = 2'-deoxy-2'-fluorocytidine-3'-phosphate
  modified_base 3: mod_base = OTHER; note = 2'-O-methyladenosine-3'-phosphate
  modified_base 4: mod_base = OTHER; note = 2'-O-methylcytidine-3'-phosphate
  modified_base 5: mod_base = OTHER; note = 2'-O-methyladenosine-3'-phosphate
  modified_base 6: mod_base = OTHER; note = 2'-deoxy-2'-fluorocytidine-3'-phosphate
  modified_base 7: mod_base = OTHER; note = 2'-O-methyluridine-3'-phosphate
  modified_base 8: mod_base = OTHER; note = 2'-O-methylguanosine-3'-phosphate
  modified_base 9: mod_base = OTHER; note = 2'-O-methyladenosine-3'-phosphate
  modified_base 10: mod_base = OTHER; note = 2'-O-methylguanosine-3'-phosphate
  modified_base 11: mod_base = OTHER; note = 2'-O-methylguanosine-3'-phosphate
  modified_base 12: mod_base = OTHER; note = 2'-O-methylguanosine-3'-phosphate
  modified_base 13: mod_base = OTHER; note = 2'-O-methyladenosine-3'-phosphate
  modified_base 14: mod_base = OTHER; note = 2'-deoxy-2'-fluorocytidine-3'-phosphate
  modified_base 15: mod_base = OTHER; note = 2'-O-methyladenosine-3'-phosphate
  modified_base 16: mod_base = OTHER; note = 2'-deoxy-2'-fluorouridine-3'-phosphate
  modified_base 17: mod_base = OTHER; note = 2'-O-methylcytidine-3'-phosphate
  modified_base 18: mod_base = OTHER; note = 2'-O-methyladenosine-3'-phosphate
  modified_base 19: mod_base = OTHER; note = 2'-O-methylcytidine-3'-phosphate
  modified_base 20: mod_base = OTHER; note = 2'-O-methyladenosine-3'-phosphate
  modified_base 21: mod_base = OTHER; note = 2'-O-methylguanosine-3'-phosphate
  modified_base 22: mod_base = OTHER; note = 2'-O-methyluridine-3'-phosphate
  modified_base 23: mod_base = OTHER; note = 2'-O-methyladenosine
tcacactgagggacatcacagta

SEQ ID NO: 5080 - RNA, 23 nt, synthetic construct
  source 1..23: mol_type = other RNA
  modified_base 1: mod_base = OTHER; note = 2'-O-methyluridine-3'-phosphate 5'phosphate
  modified_base 2: mod_base = OTHER; note = 2'-deoxy-2'-fluoroguanosine-3'-phosphate
  modified_base 3: mod_base = OTHER; note = 2'-O-methylguanosine-3'-phosphate
  modified_base 4: mod_base = OTHER; note = 2'-O-methylcytidine-3'-phosphate
  modified_base 5: mod_base = OTHER; note = 2'-O-methylcytidine-3'-phosphate
  modified_base 6: mod_base = OTHER; note = 2'-deoxy-2'-fluoroguanosine-3'-phosphate
  modified_base 7: mod_base = OTHER; note = 2'-O-methylcytidine-3'-phosphate
  modified_base 8: mod_base = OTHER; note = 2'-O-methyladenosine-3'-phosphate
  modified_base 9: mod_base = OTHER; note = 2'-O-methylcytidine-3'-phosphate
  modified_base 10: mod_base = OTHER; note = 2'-O-methyladenosine-3'-phosphate
  modified_base 11: mod_base = OTHER; note = 2'-O-methylcytidine-3'-phosphate
  modified_base 12: mod_base = OTHER; note = 2'-O-methyluridine-3'-phosphate
  modified_base 13: mod_base = OTHER; note = 2'-O-methylguanosine-3'-phosphate
  modified_base 14: mod_base = OTHER; note = 2'-deoxy-2'-fluoroadenosine-3'-phosphate
  modified_base 15: mod_base = OTHER; note = 2'-O-methylguanosine-3'-phosphate
  modified_base 16: mod_base = OTHER; note = 2'-deoxy-2'-fluoroguanosine-3'-phosphate
  modified_base 17: mod_base = OTHER; note = 2'-O-methylguanosine-3'-phosphate
  modified_base 18: mod_base = OTHER; note = 2'-O-methyladenosine-3'-phosphate
  modified_base 19: mod_base = OTHER; note = 2'-O-methylcytidine-3'-phosphate
  modified_base 20: mod_base = OTHER; note = 2'-O-methyladenosine-3'-phosphate
  modified_base 21: mod_base = OTHER; note = 2'-O-methyluridine-3'-phosphate
  modified_base 22: mod_base = OTHER; note = 2'-O-methylcytidine-3'-phosphate
  modified_base 23: mod_base = OTHER; note = 2'-O-methyladenosine
tggccgcacactgagggacatca

SEQ ID NO: 5081 - RNA, 23 nt, synthetic construct
  source 1..23: mol_type = other RNA
  modified_base 1: mod_base = OTHER; note = 2'-O-methyluridine-3'-phosphate 5'phosphate
  modified_base 2: mod_base = OTHER; note = 2'-deoxy-2'-fluoroadenosine-3'-phosphate
  modified_base 3: mod_base = OTHER; note = 2'-O-methylcytidine-3'-phosphate
  modified_base 4: mod_base = OTHER; note = 2'-O-methylcytidine-3'-phosphate
  modified_base 5: mod_base = OTHER; note = 2'-O-methylcytidine-3'-phosphate
  modified_base 6: mod_base = OTHER; note = 2'-deoxy-2'-fluorouridine-3'-phosphate
  modified_base 7: mod_base = OTHER; note = 2'-O-methyluridine-3'-phosphate
  modified_base 8: mod_base = OTHER; note = 2'-O-methylcytidine-3'-phosphate
  modified_base 9: mod_base = OTHER; note = 2'-O-methylcytidine-3'-phosphate
  modified_base 10: mod_base = OTHER; note = 2'-O-methyladenosine-3'-phosphate
  modified_base 11: mod_base = OTHER; note = 2'-O-methylguanosine-3'-phosphate
  modified_base 12: mod_base = OTHER; note = 2'-O-methylguanosine-3'-phosphate
  modified_base 13: mod_base = OTHER; note = 2'-O-methyladenosine-3'-phosphate
  modified_base 14: mod_base = OTHER; note = 2'-deoxy-2'-fluorocytidine-3'-phosphate
  modified_base 15: mod_base = OTHER; note = 2'-O-methyladenosine-3'-phosphate
  modified_base 16: mod_base = OTHER; note = 2'-deoxy-2'-fluorouridine-3'-phosphate
  modified_base 17: mod_base = OTHER; note = 2'-O-methyluridine-3'-phosphate
  modified_base 18: mod_base = OTHER; note = 2'-O-methyluridine-3'-phosphate
  modified_base 19: mod_base = OTHER; note = 2'-O-methylcytidine-3'-phosphate
  modified_base 20: mod_base = OTHER; note = 2'-O-methyluridine-3'-phosphate
  modified_base 21: mod_base = OTHER; note = 2'-O-methyluridine-3'-phosphate
  modified_base 22: mod_base = OTHER; note = 2'-O-methylcytidine-3'-phosphate
  modified_base 23: mod_base = OTHER; note = 2'-O-methylguanosine
tacccttccaggacatttcttcg

SEQ ID NO: 5082 - RNA, 23 nt, synthetic construct
  source 1..23: mol_type = other RNA
  modified_base 1: mod_base = OTHER; note = 2'-O-methyluridine-3'-phosphate 5'phosphate
  modified_base 2: mod_base = OTHER; note = 2'-deoxy-2'-fluorouridine-3'-phosphate
  modified_base 3: mod_base = OTHER; note = 2'-O-methyladenosine-3'-phosphate
  modified_base 4: mod_base = OTHER; note = 2'-O-methyladenosine-3'-phosphate
  modified_base 5: mod_base = OTHER; note = 2'-O-methylguanosine-3'-phosphate
  modified_base 6: mod_base = OTHER; note = 2'-deoxy-2'-fluoroadenosine-3'-phosphate
  modified_base 7: mod_base = OTHER; note = 2'-O-methylcytidine-3'-phosphate
  modified_base 8: mod_base = OTHER; note = 2'-O-methyluridine-3'-phosphate
  modified_base 9: mod_base = OTHER; note = 2'-O-methylguanosine-3'-phosphate
  modified_base 10: mod_base = OTHER; note = 2'-O-methyladenosine-3'-phosphate
  modified_base 11: mod_base = OTHER; note = 2'-O-methylcytidine-3'-phosphate
  modified_base 12: mod_base = OTHER; note = 2'-O-methyluridine-3'-phosphate
  modified_base 13: mod_base = OTHER; note = 2'-O-methyluridine-3'-phosphate
  modified_base 14: mod_base = OTHER; note = 2'-deoxy-2'-fluoroguanosine-3'-phosphate
  modified_base 15: mod_base = OTHER; note = 2'-O-methylcytidine-3'-phosphate
  modified_base 16: mod_base = OTHER; note = 2'-deoxy-2'-fluorocytidine-3'-phosphate
  modified_base 17: mod_base = OTHER; note = 2'-O-methyladenosine-3'-phosphate
  modified_base 18: mod_base = OTHER; note = 2'-O-methylguanosine-3'-phosphate
  modified_base 19: mod_base = OTHER; note = 2'-O-methylguanosine-3'-phosphate
  modified_base 20: mod_base = OTHER; note = 2'-O-methylguanosine-3'-phosphate
  modified_base 21: mod_base = OTHER; note = 2'-O-methylcytidine-3'-phosphate
  modified_base 22: mod_base = OTHER; note = 2'-O-methylcytidine-3'-phosphate
  modified_base 23: mod_base = OTHER; note = 2'-O-methyladenosine
ttaagactgacttgccagggcca

SEQ ID NO: 5083 - RNA, 23 nt, synthetic construct
  source 1..23: mol_type = other RNA
  modified_base 1: mod_base = OTHER; note = 2'-O-methyluridine-3'-phosphate 5'phosphate
  modified_base 2: mod_base = OTHER; note = 2'-deoxy-2'-fluorouridine-3'-phosphate
  modified_base 3: mod_base = OTHER; note = 2'-O-methylcytidine-3'-phosphate
  modified_base 4: mod_base = OTHER; note = 2'-O-methyluridine-3'-phosphate
  modified_base 5: mod_base = OTHER; note = 2'-O-methyladenosine-3'-phosphate
  modified_base 6: mod_base = OTHER; note = 2'-deoxy-2'-fluoroadenosine-3'-phosphate
  modified_base 7: mod_base = OTHER; note = 2'-O-methylguanosine-3'-phosphate
  modified_base 8: mod_base = OTHER; note = 2'-O-methyladenosine-3'-phosphate
  modified_base 9: mod_base = OTHER; note = 2'-O-methylcytidine-3'-phosphate
  modified_base 10: mod_base = OTHER; note = 2'-O-methyluridine-3'-phosphate
  modified_base 11: mod_base = OTHER; note = 2'-O-methylguanosine-3'-phosphate
  modified_base 12: mod_base = OTHER; note = 2'-O-methyladenosine-3'-phosphate
  modified_base 13: mod_base = OTHER; note = 2'-O-methylcytidine-3'-phosphate
  modified_base 14: mod_base = OTHER; note = 2'-deoxy-2'-fluorouridine-3'-phosphate
  modified_base 15: mod_base = OTHER; note = 2'-O-methyluridine-3'-phosphate
  modified_base 16: mod_base = OTHER; note = 2'-deoxy-2'-fluoroguanosine-3'-phosphate
  modified_base 17: mod_base = OTHER; note = 2'-O-methylcytidine-3'-phosphate
  modified_base 18: mod_base = OTHER; note = 2'-O-methylcytidine-3'-phosphate
  modified_base 19: mod_base = OTHER; note = 2'-O-methyladenosine-3'-phosphate
  modified_base 20: mod_base = OTHER; note = 2'-O-methylguanosine-3'-phosphate
  modified_base 21: mod_base = OTHER; note = 2'-O-methylguanosine-3'-phosphate
  modified_base 22: mod_base = OTHER; note = 2'-O-methylguanosine-3'-phosphate
  modified_base 23: mod_base = OTHER; note = 2'-O-methylcytidine
ttctaagactgacttgccagggc

SEQ ID NO: 5084 - RNA, 23 nt, synthetic construct
  source 1..23: mol_type = other RNA
  modified_base 1: mod_base = OTHER; note = 2'-O-methyluridine-3'-phosphate 5'phosphate
  modified_base 2: mod_base = OTHER; note = 2'-deoxy-2'-fluorouridine-3'-phosphate
  modified_base 3: mod_base = OTHER; note = 2'-O-methyluridine-3'-phosphate
  modified_base 4: mod_base = OTHER; note = 2'-O-methylcytidine-3'-phosphate
  modified_base 5: mod_base = OTHER; note = 2'-O-methyluridine-3'-phosphate
  modified_base 6: mod_base = OTHER; note = 2'-deoxy-2'-fluoroadenosine-3'-phosphate
  modified_base 7: mod_base = OTHER; note = 2'-O-methyladenosine-3'-phosphate
  modified_base 8: mod_base = OTHER; note = 2'-O-methylguanosine-3'-phosphate
  modified_base 9: mod_base = OTHER; note = 2'-O-methyladenosine-3'-phosphate
  modified_base 10: mod_base = OTHER; note = 2'-O-methylcytidine-3'-phosphate
  modified_base 11: mod_base = OTHER; note = 2'-O-methyluridine-3'-phosphate
  modified_base 12: mod_base = OTHER; note = 2'-O-methylguanosine-3'-phosphate
  modified_base 13: mod_base = OTHER; note = 2'-O-methyladenosine-3'-phosphate
  modified_base 14: mod_base = OTHER; note = 2'-deoxy-2'-fluorocytidine-3'-phosphate
  modified_base 15: mod_base = OTHER; note = 2'-O-methyluridine-3'-phosphate
  modified_base 16: mod_base = OTHER; note = 2'-deoxy-2'-fluorouridine-3'-phosphate
  modified_base 17: mod_base = OTHER; note = 2'-O-methylguanosine-3'-phosphate
  modified_base 18: mod_base = OTHER; note = 2'-O-methylcytidine-3'-phosphate
  modified_base 19: mod_base = OTHER; note = 2'-O-methylcytidine-3'-phosphate
  modified_base 20: mod_base = OTHER; note = 2'-O-methyladenosine-3'-phosphate
  modified_base 21: mod_base = OTHER; note = 2'-O-methylguanosine-3'-phosphate
  modified_base 22: mod_base = OTHER; note = 2'-O-methylguanosine-3'-phosphate
  modified_base 23: mod_base = OTHER; note = 2'-O-methylguanosine
tttctaagactgacttgccaggg

SEQ ID NO: 5085 - RNA, 23 nt, synthetic construct
  source 1..23: mol_type = other RNA
  modified_base 1: mod_base = OTHER; note = 2'-O-methyluridine-3'-phosphate 5'phosphate
  modified_base 2: mod_base = OTHER; note = 2'-deoxy-2'-fluoroguanosine-3'-phosphate
  modified_base 3: mod_base = OTHER; note = 2'-O-methyluridine-3'-phosphate
  modified_base 4: mod_base = OTHER; note = 2'-O-methyluridine-3'-phosphate
  modified_base 5: mod_base = OTHER; note = 2'-O-methylcytidine-3'-phosphate
  modified_base 6: mod_base = OTHER; note = 2'-deoxy-2'-fluorouridine-3'-phosphate
  modified_base 7: mod_base = OTHER; note = 2'-O-methyladenosine-3'-phosphate
  modified_base 8: mod_base = OTHER; note = 2'-O-methyladenosine-3'-phosphate
  modified_base 9: mod_base = OTHER; note = 2'-O-methylguanosine-3'-phosphate
  modified_base 10: mod_base = OTHER; note = 2'-O-methyladenosine-3'-phosphate
  modified_base 11: mod_base = OTHER; note = 2'-O-methylcytidine-3'-phosphate
  modified_base 12: mod_base = OTHER; note = 2'-O-methyluridine-3'-phosphate
  modified_base 13: mod_base = OTHER; note = 2'-O-methylguanosine-3'-phosphate
  modified_base 14: mod_base = OTHER; note = 2'-deoxy-2'-fluoroadenosine-3'-phosphate
  modified_base 15: mod_base = OTHER; note = 2'-O-methylcytidine-3'-phosphate
  modified_base 16: mod_base = OTHER; note = 2'-deoxy-2'-fluorouridine-3'-phosphate
  modified_base 17: mod_base = OTHER; note = 2'-O-methyluridine-3'-phosphate
  modified_base 18: mod_base = OTHER; note = 2'-O-methylguanosine-3'-phosphate
  modified_base 19: mod_base = OTHER; note = 2'-O-methylcytidine-3'-phosphate
  modified_base 20: mod_base = OTHER; note = 2'-O-methylcytidine-3'-phosphate
  modified_base 21: mod_base = OTHER; note = 2'-O-methyladenosine-3'-phosphate
  modified_base 22: mod_base = OTHER; note = 2'-O-methylguanosine-3'-phosphate
  modified_base 23: mod_base = OTHER; note = 2'-O-methylguanosine
tgttctaagactgacttgccagg

SEQ ID NO: 5086 - RNA, 23 nt, synthetic construct
  source 1..23: mol_type = other RNA
  modified_base 1: mod_base = OTHER; note = 2'-O-methyluridine-3'-phosphate 5'phosphate
  modified_base 2: mod_base = OTHER; note = 2'-deoxy-2'-fluorouridine-3'-phosphate
  modified_base 3: mod_base = OTHER; note = 2'-O-methylguanosine-3'-phosphate
  modified_base 4: mod_base = OTHER; note = 2'-O-methyluridine-3'-phosphate
  modified_base 5: mod_base = OTHER; note = 2'-O-methyluridine-3'-phosphate
  modified_base 6: mod_base = OTHER; note = 2'-deoxy-2'-fluorocytidine-3'-phosphate
  modified_base 7: mod_base = OTHER; note = 2'-O-methyluridine-3'-phosphate
  modified_base 8: mod_base = OTHER; note = 2'-O-methyladenosine-3'-phosphate
  modified_base 9: mod_base = OTHER; note = 2'-O-methyladenosine-3'-phosphate
  modified_base 10: mod_base = OTHER; note = 2'-O-methylguanosine-3'-phosphate
  modified_base 11: mod_base = OTHER; note = 2'-O-methyladenosine-3'-phosphate
  modified_base 12: mod_base = OTHER; note = 2'-O-methylcytidine-3'-phosphate
  modified_base 13: mod_base = OTHER; note = 2'-O-methyluridine-3'-phosphate
  modified_base 14: mod_base = OTHER; note = 2'-deoxy-2'-fluoroguanosine-3'-phosphate
  modified_base 15: mod_base = OTHER; note = 2'-O-methyladenosine-3'-phosphate
  modified_base 16: mod_base = OTHER; note = 2'-deoxy-2'-fluorocytidine-3'-phosphate
  modified_base 17: mod_base = OTHER; note = 2'-O-methyluridine-3'-phosphate
  modified_base 18: mod_base = OTHER; note = 2'-O-methyluridine-3'-phosphate
  modified_base 19: mod_base = OTHER; note = 2'-O-methylguanosine-3'-phosphate
  modified_base 20: mod_base = OTHER; note = 2'-O-methylcytidine-3'-phosphate
  modified_base 21: mod_base = OTHER; note = 2'-O-methylcytidine-3'-phosphate
  modified_base 22: mod_base = OTHER; note = 2'-O-methyladenosine-3'-phosphate
  modified_base 23: mod_base = OTHER; note = 2'-O-methylguanosine
ttgttctaagactgacttgccag

SEQ ID NO: 5087 - RNA, 23 nt, synthetic construct
  source 1..23: mol_type = other RNA
  modified_base 1: mod_base = OTHER; note = 2'-O-methyluridine-3'-phosphate 5'phosphate
  modified_base 2: mod_base = OTHER; note = 2'-deoxy-2'-fluorouridine-3'-phosphate
  modified_base 3: mod_base = OTHER; note = 2'-O-methyluridine-3'-phosphate
  modified_base 4: mod_base = OTHER; note = 2'-O-methylguanosine-3'-phosphate
  modified_base 5: mod_base = OTHER; note = 2'-O-methyluridine-3'-phosphate
  modified_base 6: mod_base = OTHER; note = 2'-deoxy-2'-fluorouridine-3'-phosphate
  modified_base 7: mod_base = OTHER; note = 2'-O-methylcytidine-3'-phosphate
  modified_base 8: mod_base = OTHER; note = 2'-O-methyluridine-3'-phosphate
  modified_base 9: mod_base = OTHER; note = 2'-O-methyladenosine-3'-phosphate
  modified_base 10: mod_base = OTHER; note = 2'-O-methyladenosine-3'-phosphate
  modified_base 11: mod_base = OTHER; note = 2'-O-methylguanosine-3'-phosphate
  modified_base 12: mod_base = OTHER; note = 2'-O-methyladenosine-3'-phosphate
  modified_base 13: mod_base = OTHER; note = 2'-O-methylcytidine-3'-phosphate
  modified_base 14: mod_base = OTHER; note = 2'-deoxy-2'-fluorouridine-3'-phosphate
  modified_base 15: mod_base = OTHER; note = 2'-O-methylguanosine-3'-phosphate
  modified_base 16: mod_base = OTHER; note = 2'-deoxy-2'-fluoroadenosine-3'-phosphate
  modified_base 17: mod_base = OTHER; note = 2'-O-methylcytidine-3'-phosphate
  modified_base 18: mod_base = OTHER; note = 2'-O-methyluridine-3'-phosphate
  modified_base 19: mod_base = OTHER; note = 2'-O-methyluridine-3'-phosphate
  modified_base 20: mod_base = OTHER; note = 2'-O-methylguanosine-3'-phosphate
  modified_base 21: mod_base = OTHER; note = 2'-O-methylcytidine-3'-phosphate
  modified_base 22: mod_base = OTHER; note = 2'-O-methylcytidine-3'-phosphate
  modified_base 23: mod_base = OTHER; note = 2'-O-methyladenosine
tttgttctaagactgacttgcca

SEQ ID NO: 5088 - RNA, 23 nt, synthetic construct
  source 1..23: mol_type = other RNA
  modified_base 1: mod_base = OTHER; note = 2'-O-methyluridine-3'-phosphate 5'phosphate
  modified_base 2: mod_base = OTHER; note = 2'-deoxy-2'-fluorocytidine-3'-phosphate
  modified_base 3: mod_base = OTHER; note = 2'-O-methyluridine-3'-phosphate
  modified_base 4: mod_base = OTHER; note = 2'-O-methyluridine-3'-phosphate
  modified_base 5: mod_base = OTHER; note = 2'-O-methylguanosine-3'-phosphate
  modified_base 6: mod_base = OTHER; note = 2'-deoxy-2'-fluorouridine-3'-phosphate
  modified_base 7: mod_base = OTHER; note = 2'-O-methyluridine-3'-phosphate
  modified_base 8: mod_base = OTHER; note = 2'-O-methylcytidine-3'-phosphate
  modified_base 9: mod_base = OTHER; note = 2'-O-methyluridine-3'-phosphate
  modified_base 10: mod_base = OTHER; note = 2'-O-methyladenosine-3'-phosphate
  modified_base 11: mod_base = OTHER; note = 2'-O-methyladenosine-3'-phosphate
  modified_base 12: mod_base = OTHER; note = 2'-O-methylguanosine-3'-phosphate
  modified_base 13: mod_base = OTHER; note = 2'-O-methyladenosine-3'-phosphate
  modified_base 14: mod_base = OTHER; note = 2'-deoxy-2'-fluorocytidine-3'-phosphate
  modified_base 15: mod_base = OTHER; note = 2'-O-methyluridine-3'-phosphate
  modified_base 16: mod_base = OTHER; note = 2'-deoxy-2'-fluoroguanosine-3'-phosphate
  modified_base 17: mod_base = OTHER; note = 2'-O-methyladenosine-3'-phosphate
  modified_base 18: mod_base = OTHER; note = 2'-O-methylcytidine-3'-phosphate
  modified_base 19: mod_base = OTHER; note = 2'-O-methyluridine-3'-phosphate
  modified_base 20: mod_base = OTHER; note = 2'-O-methyluridine-3'-phosphate
  modified_base 21: mod_base = OTHER; note = 2'-O-methylguanosine-3'-phosphate
  modified_base 22: mod_base = OTHER; note = 2'-O-methylcytidine-3'-phosphate
  modified_base 23: mod_base = OTHER; note = 2'-O-methylcytidine
tcttgttctaagactgacttgcc

SEQ ID NO: 5089 - RNA, 23 nt, synthetic construct
  source 1..23: mol_type = other RNA
  modified_base 1: mod_base = OTHER; note = 2'-O-methyluridine-3'-phosphate 5'phosphate
  modified_base 2: mod_base = OTHER; note = 2'-deoxy-2'-fluorocytidine-3'-phosphate
  modified_base 3: mod_base = OTHER; note = 2'-O-methylcytidine-3'-phosphate
  modified_base 4: mod_base = OTHER; note = 2'-O-methyluridine-3'-phosphate
  modified_base 5: mod_base = OTHER; note = 2'-O-methyluridine-3'-phosphate
  modified_base 6: mod_base = OTHER; note = 2'-deoxy-2'-fluoroguanosine-3'-phosphate
  modified_base 7: mod_base = OTHER; note = 2'-O-methyluridine-3'-phosphate
  modified_base 8: mod_base = OTHER; note = 2'-O-methyluridine-3'-phosphate
  modified_base 9: mod_base = OTHER; note = 2'-O-methylcytidine-3'-phosphate
  modified_base 10: mod_base = OTHER; note = 2'-O-methyluridine-3'-phosphate
  modified_base 11: mod_base = OTHER; note = 2'-O-methyladenosine-3'-phosphate
  modified_base 12: mod_base = OTHER; note = 2'-O-methyladenosine-3'-phosphate
  modified_base 13: mod_base = OTHER; note = 2'-O-methylguanosine-3'-phosphate
  modified_base 14: mod_base = OTHER; note = 2'-deoxy-2'-fluoroadenosine-3'-phosphate
  modified_base 15: mod_base = OTHER; note = 2'-O-methylcytidine-3'-phosphate
  modified_base 16: mod_base = OTHER; note = 2'-deoxy-2'-fluorouridine-3'-phosphate
  modified_base 17: mod_base = OTHER; note = 2'-O-methylguanosine-3'-phosphate
  modified_base 18: mod_base = OTHER; note = 2'-O-methyladenosine-3'-phosphate
  modified_base 19: mod_base = OTHER; note = 2'-O-methylcytidine-3'-phosphate
  modified_base 20: mod_base = OTHER; note = 2'-O-methyluridine-3'-phosphate
  modified_base 21: mod_base = OTHER; note = 2'-O-methyluridine-3'-phosphate
  modified_base 22: mod_base = OTHER; note = 2'-O-methylguanosine-3'-phosphate
  modified_base 23: mod_base = OTHER; note = 2'-O-methylcytidine
tccttgttctaagactgacttgc

SEQ ID NO: 5090 - RNA, 23 nt, synthetic construct
  source 1..23: mol_type = other RNA
  modified_base 1: mod_base = OTHER; note = 2'-O-methyluridine-3'-phosphate 5'phosphate
  modified_base 2: mod_base = OTHER; note = 2'-deoxy-2'-fluoroadenosine-3'-phosphate
  modified_base 3: mod_base = OTHER; note = 2'-O-methylcytidine-3'-phosphate
  modified_base 4: mod_base = OTHER; note = 2'-O-methylcytidine-3'-phosphate
  modified_base 5: mod_base = OTHER; note = 2'-O-methyluridine-3'-phosphate
  modified_base 6: mod_base = OTHER; note = 2'-deoxy-2'-fluorouridine-3'-phosphate
  modified_base 7: mod_base = OTHER; note = 2'-O-methylguanosine-3'-phosphate
  modified_base 8: mod_base = OTHER; note = 2'-O-methyluridine-3'-phosphate
  modified_base 9: mod_base = OTHER; note = 2'-O-methyluridine-3'-phosphate
  modified_base 10: mod_base = OTHER; note = 2'-O-methylcytidine-3'-phosphate
  modified_base 11: mod_base = OTHER; note = 2'-O-methyluridine-3'-phosphate
  modified_base 12: mod_base = OTHER; note = 2'-O-methyladenosine-3'-phosphate
  modified_base 13: mod_base = OTHER; note = 2'-O-methyladenosine-3'-phosphate
  modified_base 14: mod_base = OTHER; note = 2'-deoxy-2'-fluoroguanosine-3'-phosphate
  modified_base 15: mod_base = OTHER; note = 2'-O-methyladenosine-3'-phosphate
  modified_base 16: mod_base = OTHER; note = 2'-deoxy-2'-fluorocytidine-3'-phosphate
  modified_base 17: mod_base = OTHER; note = 2'-O-methyluridine-3'-phosphate
  modified_base 18: mod_base = OTHER; note = 2'-O-methylguanosine-3'-phosphate
  modified_base 19: mod_base = OTHER; note = 2'-O-methyladenosine-3'-phosphate
  modified_base 20: mod_base = OTHER; note = 2'-O-methylcytidine-3'-phosphate
  modified_base 21: mod_base = OTHER; note = 2'-O-methyluridine-3'-phosphate
  modified_base 22: mod_base = OTHER; note = 2'-O-methyluridine-3'-phosphate
  modified_base 23: mod_base = OTHER; note = 2'-O-methylguanosine
taccttgttctaagactgacttg

SEQ ID NO: 5091 - RNA, 23 nt, synthetic construct
  source 1..23: mol_type = other RNA
  modified_base 1: mod_base = OTHER; note = 2'-O-methyluridine-3'-phosphate 5'phosphate
  modified_base 2: mod_base = OTHER; note = 2'-deoxy-2'-fluoroadenosine-3'-phosphate
  modified_base 3: mod_base = OTHER; note = 2'-O-methyladenosine-3'-phosphate
  modified_base 4: mod_base = OTHER; note = 2'-O-methylcytidine-3'-phosphate
  modified_base 5: mod_base = OTHER; note = 2'-O-methylcytidine-3'-phosphate
  modified_base 6: mod_base = OTHER; note = 2'-deoxy-2'-fluorouridine-3'-phosphate
  modified_base 7: mod_base = OTHER; note = 2'-O-methyluridine-3'-phosphate
  modified_base 8: mod_base = OTHER; note = 2'-O-methylguanosine-3'-phosphate
  modified_base 9: mod_base = OTHER; note = 2'-O-methyluridine-3'-phosphate
  modified_base 10: mod_base = OTHER; note = 2'-O-methyluridine-3'-phosphate
  modified_base 11: mod_base = OTHER; note = 2'-O-methylcytidine-3'-phosphate
  modified_base 12: mod_base = OTHER; note = 2'-O-methyluridine-3'-phosphate
  modified_base 13: mod_base = OTHER; note = 2'-O-methyladenosine-3'-phosphate
  modified_base 14: mod_base = OTHER; note = 2'-deoxy-2'-fluoroadenosine-3'-phosphate
  modified_base 15: mod_base = OTHER; note = 2'-O-methylguanosine-3'-phosphate
  modified_base 16: mod_base = OTHER; note = 2'-deoxy-2'-fluoroadenosine-3'-phosphate
  modified_base 17: mod_base = OTHER; note = 2'-O-methylcytidine-3'-phosphate
  modified_base 18: mod_base = OTHER; note = 2'-O-methyluridine-3'-phosphate
  modified_base 19: mod_base = OTHER; note = 2'-O-methylguanosine-3'-phosphate
  modified_base 20: mod_base = OTHER; note = 2'-O-methyladenosine-3'-phosphate
  modified_base 21: mod_base = OTHER; note = 2'-O-methylcytidine-3'-phosphate
  modified_base 22: mod_base = OTHER; note = 2'-O-methyluridine-3'-phosphate
  modified_base 23: mod_base = OTHER; note = 2'-O-methyluridine
taaccttgttctaagactgactt

SEQ ID NO: 5092 - RNA, 23 nt, synthetic construct
  source 1..23: mol_type = other RNA
  modified_base 1: mod_base = OTHER; note = 2'-O-methyluridine-3'-phosphate 5'phosphate
  modified_base 2: mod_base = OTHER; note = 2'-deoxy-2'-fluoroadenosine-3'-phosphate
  modified_base 3: mod_base = OTHER; note = 2'-O-methyladenosine-3'-phosphate
  modified_base 4: mod_base = OTHER; note = 2'-O-methyladenosine-3'-phosphate
  modified_base 5: mod_base = OTHER; note = 2'-O-methylcytidine-3'-phosphate
  modified_base 6: mod_base = OTHER; note = 2'-deoxy-2'-fluorocytidine-3'-phosphate
  modified_base 7: mod_base = OTHER; note = 2'-O-methyluridine-3'-phosphate
  modified_base 8: mod_base = OTHER; note = 2'-O-methyluridine-3'-phosphate
  modified_base 9: mod_base = OTHER; note = 2'-O-methylguanosine-3'-phosphate
  modified_base 10: mod_base = OTHER; note = 2'-O-methyluridine-3'-phosphate
  modified_base 11: mod_base = OTHER; note = 2'-O-methyluridine-3'-phosphate
  modified_base 12: mod_base = OTHER; note = 2'-O-methylcytidine-3'-phosphate
  modified_base 13: mod_base = OTHER; note = 2'-O-methyluridine-3'-phosphate
  modified_base 14: mod_base = OTHER; note = 2'-deoxy-2'-fluoroadenosine-3'-phosphate
  modified_base 15: mod_base = OTHER; note = 2'-O-methyladenosine-3'-phosphate
  modified_base 16: mod_base = OTHER; note = 2'-deoxy-2'-fluoroguanosine-3'-phosphate
  modified_base 17: mod_base = OTHER; note = 2'-O-methyladenosine-3'-phosphate
  modified_base 18: mod_base = OTHER; note = 2'-O-methylcytidine-3'-phosphate
  modified_base 19: mod_base = OTHER; note = 2'-O-methyluridine-3'-phosphate
  modified_base 20: mod_base = OTHER; note = 2'-O-methylguanosine-3'-phosphate
  modified_base 21: mod_base = OTHER; note = 2'-O-methyladenosine-3'-phosphate
  modified_base 22: mod_base = OTHER; note = 2'-O-methylcytidine-3'-phosphate
  modified_base 23: mod_base = OTHER; note = 2'-O-methyluridine
taaaccttgttctaagactgact

SEQ ID NO: 5093 - RNA, 23 nt, synthetic construct
  source 1..23: mol_type = other RNA
  modified_base 1: mod_base = OTHER; note = 2'-O-methyluridine-3'-phosphate 5'phosphate
  modified_base 2: mod_base = OTHER; note = 2'-deoxy-2'-fluorocytidine-3'-phosphate
  modified_base 3: mod_base = OTHER; note = 2'-O-methyladenosine-3'-phosphate
  modified_base 4: mod_base = OTHER; note = 2'-O-methyladenosine-3'-phosphate
  modified_base 5: mod_base = OTHER; note = 2'-O-methyladenosine-3'-phosphate
  modified_base 6: mod_base = OTHER; note = 2'-deoxy-2'-fluorocytidine-3'-phosphate
  modified_base 7: mod_base = OTHER; note = 2'-O-methylcytidine-3'-phosphate
  modified_base 8: mod_base = OTHER; note = 2'-O-methyluridine-3'-phosphate
  modified_base 9: mod_base = OTHER; note = 2'-O-methyluridine-3'-phosphate
  modified_base 10: mod_base = OTHER; note = 2'-O-methylguanosine-3'-phosphate
  modified_base 11: mod_base = OTHER; note = 2'-O-methyluridine-3'-phosphate
  modified_base 12: mod_base = OTHER; note = 2'-O-methyluridine-3'-phosphate
  modified_base 13: mod_base = OTHER; note = 2'-O-methylcytidine-3'-phosphate
  modified_base 14: mod_base = OTHER; note = 2'-deoxy-2'-fluorouridine-3'-phosphate
  modified_base 15: mod_base = OTHER; note = 2'-O-methyladenosine-3'-phosphate
  modified_base 16: mod_base = OTHER; note = 2'-deoxy-2'-fluoroadenosine-3'-phosphate
  modified_base 17: mod_base = OTHER; note = 2'-O-methylguanosine-3'-phosphate
  modified_base 18: mod_base = OTHER; note = 2'-O-methyladenosine-3'-phosphate
  modified_base 19: mod_base = OTHER; note = 2'-O-methylcytidine-3'-phosphate
  modified_base 20: mod_base = OTHER; note = 2'-O-methyluridine-3'-phosphate
  modified_base 21: mod_base = OTHER; note = 2'-O-methylguanosine-3'-phosphate
  modified_base 22: mod_base = OTHER; note = 2'-O-methyladenosine-3'-phosphate
  modified_base 23: mod_base = OTHER; note = 2'-O-methylcytidine
tcaaaccttgttctaagactgac

SEQ ID NO: 5094 - RNA, 23 nt, synthetic construct
  source 1..23: mol_type = other RNA
  modified_base 1: mod_base = OTHER; note = 2'-O-methyluridine-3'-phosphate 5'phosphate
  modified_base 2: mod_base = OTHER; note = 2'-deoxy-2'-fluorocytidine-3'-phosphate
  modified_base 3: mod_base = OTHER; note = 2'-O-methylcytidine-3'-phosphate
  modified_base 4: mod_base = OTHER; note = 2'-O-methyladenosine-3'-phosphate
  modified_base 5: mod_base = OTHER; note = 2'-O-methyladenosine-3'-phosphate
  modified_base 6: mod_base = OTHER; note = 2'-deoxy-2'-fluoroadenosine-3'-phosphate
  modified_base 7: mod_base = OTHER; note = 2'-O-methylcytidine-3'-phosphate
  modified_base 8: mod_base = OTHER; note = 2'-O-methylcytidine-3'-phosphate
  modified_base 9: mod_base = OTHER; note = 2'-O-methyluridine-3'-phosphate
  modified_base 10: mod_base = OTHER; note = 2'-O-methyluridine-3'-phosphate
  modified_base 11: mod_base = OTHER; note = 2'-O-methylguanosine-3'-phosphate
  modified_base 12: mod_base = OTHER; note = 2'-O-methyluridine-3'-phosphate
  modified_base 13: mod_base = OTHER; note = 2'-O-methyluridine-3'-phosphate
  modified_base 14: mod_base = OTHER; note = 2'-deoxy-2'-fluorocytidine-3'-phosphate
  modified_base 15: mod_base = OTHER; note = 2'-O-methyluridine-3'-phosphate
  modified_base 16: mod_base = OTHER; note = 2'-deoxy-2'-fluoroadenosine-3'-phosphate
  modified_base 17: mod_base = OTHER; note = 2'-O-methyladenosine-3'-phosphate
  modified_base 18: mod_base = OTHER; note = 2'-O-methylguanosine-3'-phosphate
  modified_base 19: mod_base = OTHER; note = 2'-O-methyladenosine-3'-phosphate
  modified_base 20: mod_base = OTHER; note = 2'-O-methylcytidine-3'-phosphate
  modified_base 21: mod_base = OTHER; note = 2'-O-methyluridine-3'-phosphate
  modified_base 22: mod_base = OTHER; note = 2'-O-methylguanosine-3'-phosphate
  modified_base 23: mod_base = OTHER; note = 2'-O-methyladenosine
tccaaaccttgttctaagactga

SEQ ID NO: 5095 - RNA, 23 nt, synthetic construct
  source 1..23: mol_type = other RNA
  modified_base 1: mod_base = OTHER; note = 2'-O-methyluridine-3'-phosphate 5'phosphate
  modified_base 2: mod_base = OTHER; note = 2'-deoxy-2'-fluorouridine-3'-phosphate
  modified_base 3: mod_base = OTHER; note = 2'-O-methylcytidine-3'-phosphate
  modified_base 4: mod_base = OTHER; note = 2'-O-methylcytidine-3'-phosphate
  modified_base 5: mod_base = OTHER; note = 2'-O-methyladenosine-3'-phosphate
  modified_base 6: mod_base = OTHER; note = 2'-deoxy-2'-fluoroadenosine-3'-phosphate
  modified_base 7: mod_base = OTHER; note = 2'-O-methyladenosine-3'-phosphate
  modified_base 8: mod_base = OTHER; note = 2'-O-methylcytidine-3'-phosphate
  modified_base 9: mod_base = OTHER; note = 2'-O-methylcytidine-3'-phosphate
  modified_base 10: mod_base = OTHER; note = 2'-O-methyluridine-3'-phosphate
  modified_base 11: mod_base = OTHER; note = 2'-O-methyluridine-3'-phosphate
  modified_base 12: mod_base = OTHER; note = 2'-O-methylguanosine-3'-phosphate
  modified_base 13: mod_base = OTHER; note = 2'-O-methyluridine-3'-phosphate
  modified_base 14: mod_base = OTHER; note = 2'-deoxy-2'-fluorouridine-3'-phosphate
  modified_base 15: mod_base = OTHER; note = 2'-O-methylcytidine-3'-phosphate
  modified_base 16: mod_base = OTHER; note = 2'-deoxy-2'-fluorouridine-3'-phosphate
  modified_base 17: mod_base = OTHER; note = 2'-O-methyladenosine-3'-phosphate
  modified_base 18: mod_base = OTHER; note = 2'-O-methyladenosine-3'-phosphate
  modified_base 19: mod_base = OTHER; note = 2'-O-methylguanosine-3'-phosphate
  modified_base 20: mod_base = OTHER; note = 2'-O-methyladenosine-3'-phosphate
  modified_base 21: mod_base = OTHER; note = 2'-O-methylcytidine-3'-phosphate
  modified_base 22: mod_base = OTHER; note = 2'-O-methyluridine-3'-phosphate
  modified_base 23: mod_base = OTHER; note = 2'-O-methylguanosine
ttccaaaccttgttctaagactg

SEQ ID NO: 5096 - RNA, 23 nt, synthetic construct
  source 1..23: mol_type = other RNA
  modified_base 1: mod_base = OTHER; note = 2'-O-methyluridine-3'-phosphate 5'phosphate
  modified_base 2: mod_base = OTHER; note = 2'-deoxy-2'-fluorouridine-3'-phosphate
  modified_base 3: mod_base = OTHER; note = 2'-O-methyluridine-3'-phosphate
  modified_base 4: mod_base = OTHER; note = 2'-O-methylcytidine-3'-phosphate
  modified_base 5: mod_base = OTHER; note = 2'-O-methylcytidine-3'-phosphate
  modified_base 6: mod_base = OTHER; note = 2'-deoxy-2'-fluoroadenosine-3'-phosphate
  modified_base 7: mod_base = OTHER; note = 2'-O-methyladenosine-3'-phosphate
  modified_base 8: mod_base = OTHER; note = 2'-O-methyladenosine-3'-phosphate
  modified_base 9: mod_base = OTHER; note = 2'-O-methylcytidine-3'-phosphate
  modified_base 10: mod_base = OTHER; note = 2'-O-methylcytidine-3'-phosphate
  modified_base 11: mod_base = OTHER; note = 2'-O-methyluridine-3'-phosphate
  modified_base 12: mod_base = OTHER; note = 2'-O-methyluridine-3'-phosphate
  modified_base 13: mod_base = OTHER; note = 2'-O-methylguanosine-3'-phosphate
  modified_base 14: mod_base = OTHER; note = 2'-deoxy-2'-fluorouridine-3'-phosphate
  modified_base 15: mod_base = OTHER; note = 2'-O-methyluridine-3'-phosphate
  modified_base 16: mod_base = OTHER; note = 2'-deoxy-2'-fluorocytidine-3'-phosphate
  modified_base 17: mod_base = OTHER; note = 2'-O-methyluridine-3'-phosphate
  modified_base 18: mod_base = OTHER; note = 2'-O-methyladenosine-3'-phosphate
  modified_base 19: mod_base = OTHER; note = 2'-O-methyladenosine-3'-phosphate
  modified_base 20: mod_base = OTHER; note = 2'-O-methylguanosine-3'-phosphate
  modified_base 21: mod_base = OTHER; note = 2'-O-methyladenosine-3'-phosphate
  modified_base 22: mod_base = OTHER; note = 2'-O-methylcytidine-3'-phosphate
  modified_base 23: mod_base = OTHER; note = 2'-O-methyluridine
tttccaaaccttgttctaagact

SEQ ID NO: 5097 - RNA, 23 nt, synthetic construct
  source 1..23: mol_type = other RNA
  modified_base 1: mod_base = OTHER; note = 2'-O-methyluridine-3'-phosphate 5'phosphate
  modified_base 2: mod_base = OTHER; note = 2'-deoxy-2'-fluoroadenosine-3'-phosphate
  modified_base 3: mod_base = OTHER; note = 2'-O-methyluridine-3'-phosphate
  modified_base 4: mod_base = OTHER; note = 2'-O-methyluridine-3'-phosphate
  modified_base 5: mod_base = OTHER; note = 2'-O-methylcytidine-3'-phosphate
  modified_base 6: mod_base = OTHER; note = 2'-deoxy-2'-fluorocytidine-3'-phosphate
  modified_base 7: mod_base = OTHER; note = 2'-O-methyladenosine-3'-phosphate
  modified_base 8: mod_base = OTHER; note = 2'-O-methyladenosine-3'-phosphate
  modified_base 9: mod_base = OTHER; note = 2'-O-methyladenosine-3'-phosphate
  modified_base 10: mod_base = OTHER; note = 2'-O-methylcytidine-3'-phosphate
  modified_base 11: mod_base = OTHER; note = 2'-O-methylcytidine-3'-phosphate
  modified_base 12: mod_base = OTHER; note = 2'-O-methyluridine-3'-phosphate
  modified_base 13: mod_base = OTHER; note = 2'-O-methyluridine-3'-phosphate
  modified_base 14: mod_base = OTHER; note = 2'-deoxy-2'-fluoroguanosine-3'-phosphate
  modified_base 15: mod_base = OTHER; note = 2'-O-methyluridine-3'-phosphate
  modified_base 16: mod_base = OTHER; note = 2'-deoxy-2'-fluorouridine-3'-phosphate
  modified_base 17: mod_base = OTHER; note = 2'-O-methylcytidine-3'-phosphate
  modified_base 18: mod_base = OTHER; note = 2'-O-methyluridine-3'-phosphate
  modified_base 19: mod_base = OTHER; note = 2'-O-methyladenosine-3'-phosphate
  modified_base 20: mod_base = OTHER; note = 2'-O-methyladenosine-3'-phosphate
  modified_base 21: mod_base = OTHER; note = 2'-O-methylguanosine-3'-phosphate
  modified_base 22: mod_base = OTHER; note = 2'-O-methyladenosine-3'-phosphate
  modified_base 23: mod_base = OTHER; note = 2'-O-methylcytidine
tattccaaaccttgttctaagac

SEQ ID NO: 5098 - RNA, 23 nt, synthetic construct
  source 1..23: mol_type = other RNA
  modified_base 1: mod_base = OTHER; note = 2'-O-methyluridine-3'-phosphate 5'phosphate
  modified_base 2: mod_base = OTHER; note = 2'-deoxy-2'-fluorocytidine-3'-phosphate
  modified_base 3: mod_base = OTHER; note = 2'-O-methyladenosine-3'-phosphate
  modified_base 4: mod_base = OTHER; note = 2'-O-methyluridine-3'-phosphate
  modified_base 5: mod_base = OTHER; note = 2'-O-methyluridine-3'-phosphate
  modified_base 6: mod_base = OTHER; note = 2'-deoxy-2'-fluorocytidine-3'-phosphate
  modified_base 7: mod_base = OTHER; note = 2'-O-methylcytidine-3'-phosphate
  modified_base 8: mod_base = OTHER; note = 2'-O-methyladenosine-3'-phosphate
  modified_base 9: mod_base = OTHER; note = 2'-O-methyladenosine-3'-phosphate
  modified_base 10: mod_base = OTHER; note = 2'-O-methyladenosine-3'-phosphate
  modified_base 11: mod_base = OTHER; note = 2'-O-methylcytidine-3'-phosphate
  modified_base 12: mod_base = OTHER; note = 2'-O-methylcytidine-3'-phosphate
  modified_base 13: mod_base = OTHER; note = 2'-O-methyluridine-3'-phosphate
  modified_base 14: mod_base = OTHER; note = 2'-deoxy-2'-fluorouridine-3'-phosphate
  modified_base 15: mod_base = OTHER; note = 2'-O-methylguanosine-3'-phosphate
  modified_base 16: mod_base = OTHER; note = 2'-deoxy-2'-fluorouridine-3'-phosphate
  modified_base 17: mod_base = OTHER; note = 2'-O-methyluridine-3'-phosphate
  modified_base 18: mod_base = OTHER; note = 2'-O-methylcytidine-3'-phosphate
  modified_base 19: mod_base = OTHER; note = 2'-O-methyluridine-3'-phosphate
  modified_base 20: mod_base = OTHER; note = 2'-O-methyladenosine-3'-phosphate
  modified_base 21: mod_base = OTHER; note = 2'-O-methyladenosine-3'-phosphate
  modified_base 22: mod_base = OTHER; note = 2'-O-methylguanosine-3'-phosphate
  modified_base 23: mod_base = OTHER; note = 2'-O-methyladenosine
tcattccaaaccttgttctaaga

SEQ ID NO: 5099 - RNA, 23 nt, synthetic construct
  source 1..23: mol_type = other RNA
  modified_base 1: mod_base = OTHER; note = 2'-O-methyluridine-3'-phosphate 5'phosphate
  modified_base 2: mod_base = OTHER; note = 2'-deoxy-2'-fluoroguanosine-3'-phosphate
  modified_base 3: mod_base = OTHER; note = 2'-O-methylcytidine-3'-phosphate
  modified_base 4: mod_base = OTHER; note = 2'-O-methyladenosine-3'-phosphate
  modified_base 5: mod_base = OTHER; note = 2'-O-methyluridine-3'-phosphate
  modified_base 6: mod_base = OTHER; note = 2'-deoxy-2'-fluorouridine-3'-phosphate
  modified_base 7: mod_base = OTHER; note = 2'-O-methylcytidine-3'-phosphate
  modified_base 8: mod_base = OTHER; note = 2'-O-methylcytidine-3'-phosphate
  modified_base 9: mod_base = OTHER; note = 2'-O-methyladenosine-3'-phosphate
  modified_base 10: mod_base = OTHER; note = 2'-O-methyladenosine-3'-phosphate
  modified_base 11: mod_base = OTHER; note = 2'-O-methyladenosine-3'-phosphate
  modified_base 12: mod_base = OTHER; note = 2'-O-methylcytidine-3'-phosphate
  modified_base 13: mod_base = OTHER; note = 2'-O-methylcytidine-3'-phosphate
  modified_base 14: mod_base = OTHER; note = 2'-deoxy-2'-fluorouridine-3'-phosphate
  modified_base 15: mod_base = OTHER; note = 2'-O-methyluridine-3'-phosphate
  modified_base 16: mod_base = OTHER; note = 2'-deoxy-2'-fluoroguanosine-3'-phosphate
  modified_base 17: mod_base = OTHER; note = 2'-O-methyluridine-3'-phosphate
  modified_base 18: mod_base = OTHER; note = 2'-O-methyluridine-3'-phosphate
  modified_base 19: mod_base = OTHER; note = 2'-O-methylcytidine-3'-phosphate
  modified_base 20: mod_base = OTHER; note = 2'-O-methyluridine-3'-phosphate
  modified_base 21: mod_base = OTHER; note = 2'-O-methyladenosine-3'-phosphate
  modified_base 22: mod_base = OTHER; note = 2'-O-methyladenosine-3'-phosphate
  modified_base 23: mod_base = OTHER; note = 2'-O-methylguanosine
tgcattccaaaccttgttctaag

SEQ ID NO: 5100 - RNA, 23 nt, synthetic construct
  source 1..23: mol_type = other RNA
  modified_base 1: mod_base = OTHER; note = 2'-O-methyluridine-3'-phosphate 5'phosphate
  modified_base 2: mod_base = OTHER; note = 2'-deoxy-2'-fluorouridine-3'-phosphate
  modified_base 3: mod_base = OTHER; note = 2'-O-methylguanosine-3'-phosphate
  modified_base 4: mod_base = OTHER; note = 2'-O-methylcytidine-3'-phosphate
  modified_base 5: mod_base = OTHER; note = 2'-O-methyladenosine-3'-phosphate
  modified_base 6: mod_base = OTHER; note = 2'-deoxy-2'-fluorouridine-3'-phosphate
  modified_base 7: mod_base = OTHER; note = 2'-O-methyluridine-3'-phosphate
  modified_base 8: mod_base = OTHER; note = 2'-O-methylcytidine-3'-phosphate
  modified_base 9: mod_base = OTHER; note = 2'-O-methylcytidine-3'-phosphate
  modified_base 10: mod_base = OTHER; note = 2'-O-methyladenosine-3'-phosphate
  modified_base 11: mod_base = OTHER; note = 2'-O-methyladenosine-3'-phosphate
  modified_base 12: mod_base = OTHER; note = 2'-O-methyladenosine-3'-phosphate
  modified_base 13: mod_base = OTHER; note = 2'-O-methylcytidine-3'-phosphate
  modified_base 14: mod_base = OTHER; note = 2'-deoxy-2'-fluorocytidine-3'-phosphate
  modified_base 15: mod_base = OTHER; note = 2'-O-methyluridine-3'-phosphate
  modified_base 16: mod_base = OTHER; note = 2'-deoxy-2'-fluorouridine-3'-phosphate
  modified_base 17: mod_base = OTHER; note = 2'-O-methylguanosine-3'-phosphate
  modified_base 18: mod_base = OTHER; note = 2'-O-methyluridine-3'-phosphate
  modified_base 19: mod_base = OTHER; note = 2'-O-methyluridine-3'-phosphate
  modified_base 20: mod_base = OTHER; note = 2'-O-methylcytidine-3'-phosphate
  modified_base 21: mod_base = OTHER; note = 2'-O-methyluridine-3'-phosphate
  modified_base 22: mod_base = OTHER; note = 2'-O-methyladenosine-3'-phosphate
  modified_base 23: mod_base = OTHER; note = 2'-O-methyladenosine
ttgcattccaaaccttgttctaa

SEQ ID NO: 5101 - RNA, 23 nt, synthetic construct
  source 1..23: mol_type = other RNA
  modified_base 1: mod_base = OTHER; note = 2'-O-methyluridine-3'-phosphate 5'phosphate
  modified_base 2: mod_base = OTHER; note = 2'-deoxy-2'-fluoroguanosine-3'-phosphate
  modified_base 3: mod_base = OTHER; note = 2'-O-methyluridine-3'-phosphate
  modified_base 4: mod_base = OTHER; note = 2'-O-methylguanosine-3'-phosphate
  modified_base 5: mod_base = OTHER; note = 2'-O-methylcytidine-3'-phosphate
  modified_base 6: mod_base = OTHER; note = 2'-deoxy-2'-fluoroadenosine-3'-phosphate
  modified_base 7: mod_base = OTHER; note = 2'-O-methyluridine-3'-phosphate
  modified_base 8: mod_base = OTHER; note = 2'-O-methyluridine-3'-phosphate
  modified_base 9: mod_base = OTHER; note = 2'-O-methylcytidine-3'-phosphate
  modified_base 10: mod_base = OTHER; note = 2'-O-methylcytidine-3'-phosphate
  modified_base 11: mod_base = OTHER; note = 2'-O-methyladenosine-3'-phosphate
  modified_base 12: mod_base = OTHER; note = 2'-O-methyladenosine-3'-phosphate
  modified_base 13: mod_base = OTHER; note = 2'-O-methyladenosine-3'-phosphate
  modified_base 14: mod_base = OTHER; note = 2'-deoxy-2'-fluorocytidine-3'-phosphate
  modified_base 15: mod_base = OTHER; note = 2'-O-methylcytidine-3'-phosphate
  modified_base 16: mod_base = OTHER; note = 2'-deoxy-2'-fluorouridine-3'-phosphate
  modified_base 17: mod_base = OTHER; note = 2'-O-methyluridine-3'-phosphate
  modified_base 18: mod_base = OTHER; note = 2'-O-methylguanosine-3'-phosphate
  modified_base 19: mod_base = OTHER; note = 2'-O-methyluridine-3'-phosphate
  modified_base 20: mod_base = OTHER; note = 2'-O-methyluridine-3'-phosphate
  modified_base 21: mod_base = OTHER; note = 2'-O-methylcytidine-3'-phosphate
  modified_base 22: mod_base = OTHER; note = 2'-O-methyluridine-3'-phosphate
  modified_base 23: mod_base = OTHER; note = 2'-O-methyladenosine
tgtgcattccaaaccttgttcta

SEQ ID NO: 5102 - RNA, 23 nt, synthetic construct
  source 1..23: mol_type = other RNA
  modified_base 1: mod_base = OTHER; note = 2'-O-methyluridine-3'-phosphate 5'phosphate
  modified_base 2: mod_base = OTHER; note = 2'-deoxy-2'-fluoroadenosine-3'-phosphate
  modified_base 3: mod_base = OTHER; note = 2'-O-methylguanosine-3'-phosphate
  modified_base 4: mod_base = OTHER; note = 2'-O-methyluridine-3'-phosphate
  modified_base 5: mod_base = OTHER; note = 2'-O-methylguanosine-3'-phosphate
  modified_base 6: mod_base = OTHER; note = 2'-deoxy-2'-fluorocytidine-3'-phosphate
  modified_base 7: mod_base = OTHER; note = 2'-O-methyladenosine-3'-phosphate
  modified_base 8: mod_base = OTHER; note = 2'-O-methyluridine-3'-phosphate
  modified_base 9: mod_base = OTHER; note = 2'-O-methyluridine-3'-phosphate
  modified_base 10: mod_base = OTHER; note = 2'-O-methylcytidine-3'-phosphate
  modified_base 11: mod_base = OTHER; note = 2'-O-methylcytidine-3'-phosphate
  modified_base 12: mod_base = OTHER; note = 2'-O-methyladenosine-3'-phosphate
  modified_base 13: mod_base = OTHER; note = 2'-O-methyladenosine-3'-phosphate
  modified_base 14: mod_base = OTHER; note = 2'-deoxy-2'-fluoroadenosine-3'-phosphate
  modified_base 15: mod_base = OTHER; note = 2'-O-methylcytidine-3'-phosphate
  modified_base 16: mod_base = OTHER; note = 2'-deoxy-2'-fluorocytidine-3'-phosphate
  modified_base 17: mod_base = OTHER; note = 2'-O-methyluridine-3'-phosphate
  modified_base 18: mod_base = OTHER; note = 2'-O-methyluridine-3'-phosphate
  modified_base 19: mod_base = OTHER; note = 2'-O-methylguanosine-3'-phosphate
  modified_base 20: mod_base = OTHER; note = 2'-O-methyluridine-3'-phosphate
  modified_base 21: mod_base = OTHER; note = 2'-O-methyluridine-3'-phosphate
  modified_base 22: mod_base = OTHER; note = 2'-O-methylcytidine-3'-phosphate
  modified_base 23: mod_base = OTHER; note = 2'-O-methyluridine
tagtgcattccaaaccttgttct

SEQ ID NO: 5103 - RNA, 23 nt, synthetic construct
  source 1..23: mol_type = other RNA
  modified_base 1: mod_base = OTHER; note = 2'-O-methyluridine-3'-phosphate 5'phosphate
  modified_base 2: mod_base = OTHER; note = 2'-deoxy-2'-fluoroadenosine-3'-phosphate
  modified_base 3: mod_base = OTHER; note = 2'-O-methyladenosine-3'-phosphate
  modified_base 4: mod_base = OTHER; note = 2'-O-methylguanosine-3'-phosphate
  modified_base 5: mod_base = OTHER; note = 2'-O-methyluridine-3'-phosphate
  modified_base 6: mod_base = OTHER; note = 2'-deoxy-2'-fluoroguanosine-3'-phosphate
  modified_base 7: mod_base = OTHER; note = 2'-O-methylcytidine-3'-phosphate
  modified_base 8: mod_base = OTHER; note = 2'-O-methyladenosine-3'-phosphate
  modified_base 9: mod_base = OTHER; note = 2'-O-methyluridine-3'-phosphate
  modified_base 10: mod_base = OTHER; note = 2'-O-methyluridine-3'-phosphate
  modified_base 11: mod_base = OTHER; note = 2'-O-methylcytidine-3'-phosphate
  modified_base 12: mod_base = OTHER; note = 2'-O-methylcytidine-3'-phosphate
  modified_base 13: mod_base = OTHER; note = 2'-O-methyladenosine-3'-phosphate
  modified_base 14: mod_base = OTHER; note = 2'-deoxy-2'-fluoroadenosine-3'-phosphate
  modified_base 15: mod_base = OTHER; note = 2'-O-methyladenosine-3'-phosphate
  modified_base 16: mod_base = OTHER; note = 2'-deoxy-2'-fluorocytidine-3'-phosphate
  modified_base 17: mod_base = OTHER; note = 2'-O-methylcytidine-3'-phosphate
  modified_base 18: mod_base = OTHER; note = 2'-O-methyluridine-3'-phosphate
  modified_base 19: mod_base = OTHER; note = 2'-O-methyluridine-3'-phosphate
  modified_base 20: mod_base = OTHER; note = 2'-O-methylguanosine-3'-phosphate
  modified_base 21: mod_base = OTHER; note = 2'-O-methyluridine-3'-phosphate
  modified_base 22: mod_base = OTHER; note = 2'-O-methyluridine-3'-phosphate
  modified_base 23: mod_base = OTHER; note = 2'-O-methylcytidine
taagtgcattccaaaccttgttc

SEQ ID NO: 5104 - RNA, 23 nt, synthetic construct
  source 1..23: mol_type = other RNA
  modified_base 1: mod_base = OTHER; note = 2'-O-methyluridine-3'-phosphate 5'phosphate
  modified_base 2: mod_base = OTHER; note = 2'-deoxy-2'-fluoroguanosine-3'-phosphate
  modified_base 3: mod_base = OTHER; note = 2'-O-methyladenosine-3'-phosphate
  modified_base 4: mod_base = OTHER; note = 2'-O-methyladenosine-3'-phosphate
  modified_base 5: mod_base = OTHER; note = 2'-O-methylguanosine-3'-phosphate
  modified_base 6: mod_base = OTHER; note = 2'-deoxy-2'-fluorouridine-3'-phosphate
  modified_base 7: mod_base = OTHER; note = 2'-O-methylguanosine-3'-phosphate
  modified_base 8: mod_base = OTHER; note = 2'-O-methylcytidine-3'-phosphate
  modified_base 9: mod_base = OTHER; note = 2'-O-methyladenosine-3'-phosphate
  modified_base 10: mod_base = OTHER; note = 2'-O-methyluridine-3'-phosphate
  modified_base 11: mod_base = OTHER; note = 2'-O-methyluridine-3'-phosphate
  modified_base 12: mod_base = OTHER; note = 2'-O-methylcytidine-3'-phosphate
  modified_base 13: mod_base = OTHER; note = 2'-O-methylcytidine-3'-phosphate
  modified_base 14: mod_base = OTHER; note = 2'-deoxy-2'-fluoroadenosine-3'-phosphate
  modified_base 15: mod_base = OTHER; note = 2'-O-methyladenosine-3'-phosphate
  modified_base 16: mod_base = OTHER; note = 2'-deoxy-2'-fluoroadenosine-3'-phosphate
  modified_base 17: mod_base = OTHER; note = 2'-O-methylcytidine-3'-phosphate
  modified_base 18: mod_base = OTHER; note = 2'-O-methylcytidine-3'-phosphate
  modified_base 19: mod_base = OTHER; note = 2'-O-methyluridine-3'-phosphate
  modified_base 20: mod_base = OTHER; note = 2'-O-methyluridine-3'-phosphate
  modified_base 21: mod_base = OTHER; note = 2'-O-methylguanosine-3'-phosphate
  modified_base 22: mod_base = OTHER; note = 2'-O-methyluridine-3'-phosphate
  modified_base 23: mod_base = OTHER; note = 2'-O-methyluridine
tgaagtgcattccaaaccttgtt

SEQ ID NO: 5105 - RNA, 23 nt, synthetic construct
  source 1..23: mol_type = other RNA
  modified_base 1: mod_base = OTHER; note = 2'-O-methyluridine-3'-phosphate 5'phosphate
  modified_base 2: mod_base = OTHER; note = 2'-deoxy-2'-fluoroadenosine-3'-phosphate
  modified_base 3: mod_base = OTHER; note = 2'-O-methylguanosine-3'-phosphate
  modified_base 4: mod_base = OTHER; note = 2'-O-methyladenosine-3'-phosphate
  modified_base 5: mod_base = OTHER; note = 2'-O-methyladenosine-3'-phosphate
  modified_base 6: mod_base = OTHER; note = 2'-deoxy-2'-fluoroguanosine-3'-phosphate
  modified_base 7: mod_base = OTHER; note = 2'-O-methyluridine-3'-phosphate
  modified_base 8: mod_base = OTHER; note = 2'-O-methylguanosine-3'-phosphate
  modified_base 9: mod_base = OTHER; note = 2'-O-methylcytidine-3'-phosphate
  modified_base 10: mod_base = OTHER; note = 2'-O-methyladenosine-3'-phosphate
  modified_base 11: mod_base = OTHER; note = 2'-O-methyluridine-3'-phosphate
  modified_base 12: mod_base = OTHER; note = 2'-O-methyluridine-3'-phosphate
  modified_base 13: mod_base = OTHER; note = 2'-O-methylcytidine-3'-phosphate
  modified_base 14: mod_base = OTHER; note = 2'-deoxy-2'-fluorocytidine-3'-phosphate
  modified_base 15: mod_base = OTHER; note = 2'-O-methyladenosine-3'-phosphate
  modified_base 16: mod_base = OTHER; note = 2'-deoxy-2'-fluoroadenosine-3'-phosphate
  modified_base 17: mod_base = OTHER; note = 2'-O-methyladenosine-3'-phosphate
  modified_base 18: mod_base = OTHER; note = 2'-O-methylcytidine-3'-phosphate
  modified_base 19: mod_base = OTHER; note = 2'-O-methylcytidine-3'-phosphate
  modified_base 20: mod_base = OTHER; note = 2'-O-methyluridine-3'-phosphate
  modified_base 21: mod_base = OTHER; note = 2'-O-methyluridine-3'-phosphate
  modified_base 22: mod_base = OTHER; note = 2'-O-methylguanosine-3'-phosphate
  modified_base 23: mod_base = OTHER; note = 2'-O-methyluridine
tagaagtgcattccaaaccttgt

SEQ ID NO: 5106 - RNA, 23 nt, synthetic construct
  source 1..23: mol_type = other RNA
  modified_base 1: mod_base = OTHER; note = 2'-O-methyluridine-3'-phosphate 5'phosphate
  modified_base 2: mod_base = OTHER; note = 2'-deoxy-2'-fluorocytidine-3'-phosphate
  modified_base 3: mod_base = OTHER; note = 2'-O-methyladenosine-3'-phosphate
  modified_base 4: mod_base = OTHER; note = 2'-O-methylguanosine-3'-phosphate
  modified_base 5: mod_base = OTHER; note = 2'-O-methyladenosine-3'-phosphate
  modified_base 6: mod_base = OTHER; note = 2'-deoxy-2'-fluoroadenosine-3'-phosphate
  modified_base 7: mod_base = OTHER; note = 2'-O-methylguanosine-3'-phosphate
  modified_base 8: mod_base = OTHER; note = 2'-O-methyluridine-3'-phosphate
  modified_base 9: mod_base = OTHER; note = 2'-O-methylguanosine-3'-phosphate
  modified_base 10: mod_base = OTHER; note = 2'-O-methylcytidine-3'-phosphate
  modified_base 11: mod_base = OTHER; note = 2'-O-methyladenosine-3'-phosphate
  modified_base 12: mod_base = OTHER; note = 2'-O-methyluridine-3'-phosphate
  modified_base 13: mod_base = OTHER; note = 2'-O-methyluridine-3'-phosphate
  modified_base 14: mod_base = OTHER; note = 2'-deoxy-2'-fluorocytidine-3'-phosphate
  modified_base 15: mod_base = OTHER; note = 2'-O-methylcytidine-3'-phosphate
  modified_base 16: mod_base = OTHER; note = 2'-deoxy-2'-fluoroadenosine-3'-phosphate
  modified_base 17: mod_base = OTHER; note = 2'-O-methyladenosine-3'-phosphate
  modified_base 18: mod_base = OTHER; note = 2'-O-methyladenosine-3'-phosphate
  modified_base 19: mod_base = OTHER; note = 2'-O-methylcytidine-3'-phosphate
  modified_base 20: mod_base = OTHER; note = 2'-O-methylcytidine-3'-phosphate
  modified_base 21: mod_base = OTHER; note = 2'-O-methyluridine-3'-phosphate
  modified_base 22: mod_base = OTHER; note = 2'-O-methyluridine-3'-phosphate
  modified_base 23: mod_base = OTHER; note = 2'-O-methylguanosine
tcagaagtgcattccaaaccttg

SEQ ID NO: 5107 - RNA, 23 nt, synthetic construct
  source 1..23: mol_type = other RNA
  modified_base 1: mod_base = OTHER; note = 2'-O-methyluridine-3'-phosphate 5'phosphate
  modified_base 2: mod_base = OTHER; note = 2'-deoxy-2'-fluoroadenosine-3'-phosphate
  modified_base 3: mod_base = OTHER; note = 2'-O-methylcytidine-3'-phosphate
  modified_base 4: mod_base = OTHER; note = 2'-O-methyladenosine-3'-phosphate
  modified_base 5: mod_base = OTHER; note = 2'-O-methylguanosine-3'-phosphate
  modified_base 6: mod_base = OTHER; note = 2'-deoxy-2'-fluoroadenosine-3'-phosphate
  modified_base 7: mod_base = OTHER; note = 2'-O-methyladenosine-3'-phosphate
  modified_base 8: mod_base = OTHER; note = 2'-O-methylguanosine-3'-phosphate
  modified_base 9: mod_base = OTHER; note = 2'-O-methyluridine-3'-phosphate
  modified_base 10: mod_base = OTHER; note = 2'-O-methylguanosine-3'-phosphate
  modified_base 11: mod_base = OTHER; note = 2'-O-methylcytidine-3'-phosphate
  modified_base 12: mod_base = OTHER; note = 2'-O-methyladenosine-3'-phosphate
  modified_base 13: mod_base = OTHER; note = 2'-O-methyluridine-3'-phosphate
  modified_base 14: mod_base = OTHER; note = 2'-deoxy-2'-fluorouridine-3'-phosphate
  modified_base 15: mod_base = OTHER; note = 2'-O-methylcytidine-3'-phosphate
  modified_base 16: mod_base = OTHER; note = 2'-deoxy-2'-fluorocytidine-3'-phosphate
  modified_base 17: mod_base = OTHER; note = 2'-O-methyladenosine-3'-phosphate
  modified_base 18: mod_base = OTHER; note = 2'-O-methyladenosine-3'-phosphate
  modified_base 19: mod_base = OTHER; note = 2'-O-methyladenosine-3'-phosphate
  modified_base 20: mod_base = OTHER; note = 2'-O-methylcytidine-3'-phosphate
  modified_base 21: mod_base = OTHER; note = 2'-O-methylcytidine-3'-phosphate
  modified_base 22: mod_base = OTHER; note = 2'-O-methyluridine-3'-phosphate
  modified_base 23: mod_base = OTHER; note = 2'-O-methyluridine
tacagaagtgcattccaaacctt

SEQ ID NO: 5108 - RNA, 23 nt, synthetic construct
  source 1..23: mol_type = other RNA
  modified_base 1: mod_base = OTHER; note = 2'-O-methyluridine-3'-phosphate 5'phosphate
  modified_base 2: mod_base = OTHER; note = 2'-deoxy-2'-fluorouridine-3'-phosphate
  modified_base 3: mod_base = OTHER; note = 2'-O-methylcytidine-3'-phosphate
  modified_base 4: mod_base = OTHER; note = 2'-O-methylcytidine-3'-phosphate
  modified_base 5: mod_base = OTHER; note = 2'-O-methyladenosine-3'-phosphate
  modified_base 6: mod_base = OTHER; note = 2'-deoxy-2'-fluorocytidine-3'-phosphate
  modified_base 7: mod_base = OTHER; note = 2'-O-methyladenosine-3'-phosphate
  modified_base 8: mod_base = OTHER; note = 2'-O-methylguanosine-3'-phosphate
  modified_base 9: mod_base = OTHER; note = 2'-O-methyladenosine-3'-phosphate
  modified_base 10: mod_base = OTHER; note = 2'-O-methyladenosine-3'-phosphate
  modified_base 11: mod_base = OTHER; note = 2'-O-methylguanosine-3'-phosphate
  modified_base 12: mod_base = OTHER; note = 2'-O-methyluridine-3'-phosphate
  modified_base 13: mod_base = OTHER; note = 2'-O-methylguanosine-3'-phosphate
  modified_base 14: mod_base = OTHER; note = 2'-deoxy-2'-fluorocytidine-3'-phosphate
  modified_base 15: mod_base = OTHER; note = 2'-O-methyladenosine-3'-phosphate
  modified_base 16: mod_base = OTHER; note = 2'-deoxy-2'-fluorouridine-3'-phosphate
  modified_base 17: mod_base = OTHER; note = 2'-O-methyluridine-3'-phosphate
  modified_base 18: mod_base = OTHER; note = 2'-O-methylcytidine-3'-phosphate
  modified_base 19: mod_base = OTHER; note = 2'-O-methylcytidine-3'-phosphate
  modified_base 20: mod_base = OTHER; note = 2'-O-methyladenosine-3'-phosphate
  modified_base 21: mod_base = OTHER; note = 2'-O-methyladenosine-3'-phosphate
  modified_base 22: mod_base = OTHER; note = 2'-O-methyladenosine-3'-phosphate
  modified_base 23: mod_base = OTHER; note = 2'-O-methylcytidine
ttccacagaagtgcattccaaac

SEQ ID NO: 5109 - RNA, 23 nt, synthetic construct
  source 1..23: mol_type = other RNA
  modified_base 1: mod_base = OTHER; note = 2'-O-methyluridine-3'-phosphate 5'phosphate
  modified_base 2: mod_base = OTHER; note = 2'-deoxy-2'-fluorocytidine-3'-phosphate
  modified_base 3: mod_base = OTHER; note = 2'-O-methyluridine-3'-phosphate
  modified_base 4: mod_base = OTHER; note = 2'-O-methylcytidine-3'-phosphate
  modified_base 5: mod_base = OTHER; note = 2'-O-methylcytidine-3'-phosphate
  modified_base 6: mod_base = OTHER; note = 2'-deoxy-2'-fluoroadenosine-3'-phosphate
  modified_base 7: mod_base = OTHER; note = 2'-O-methylcytidine-3'-phosphate
  modified_base 8: mod_base = OTHER; note = 2'-O-methyladenosine-3'-phosphate
  modified_base 9: mod_base = OTHER; note = 2'-O-methylguanosine-3'-phosphate
  modified_base 10: mod_base = OTHER; note = 2'-O-methyladenosine-3'-phosphate
  modified_base 11: mod_base = OTHER; note = 2'-O-methyladenosine-3'-phosphate
  modified_base 12: mod_base = OTHER; note = 2'-O-methylguanosine-3'-phosphate
  modified_base 13: mod_base = OTHER; note = 2'-O-methyluridine-3'-phosphate
  modified_base 14: mod_base = OTHER; note = 2'-deoxy-2'-fluoroguanosine-3'-phosphate
  modified_base 15: mod_base = OTHER; note = 2'-O-methylcytidine-3'-phosphate
  modified_base 16: mod_base = OTHER; note = 2'-deoxy-2'-fluoroadenosine-3'-phosphate
  modified_base 17: mod_base = OTHER; note = 2'-O-methyluridine-3'-phosphate
  modified_base 18: mod_base = OTHER; note = 2'-O-methyluridine-3'-phosphate
  modified_base 19: mod_base = OTHER; note = 2'-O-methylcytidine-3'-phosphate
  modified_base 20: mod_base = OTHER; note = 2'-O-methylcytidine-3'-phosphate
  modified_base 21: mod_base = OTHER; note = 2'-O-methyladenosine-3'-phosphate
  modified_base 22: mod_base = OTHER; note = 2'-O-methyladenosine-3'-phosphate
  modified_base 23: mod_base = OTHER; note = 2'-O-methyladenosine
tctccacagaagtgcattccaaa

SEQ ID NO: 5110 - RNA, 23 nt, synthetic construct
  source 1..23: mol_type = other RNA
  modified_base 1: mod_base = OTHER; note = 2'-O-methyluridine-3'-phosphate 5'phosphate
  modified_base 2: mod_base = OTHER; note = 2'-deoxy-2'-fluoroguanosine-3'-phosphate
  modified_base 3: mod_base = OTHER; note = 2'-O-methylcytidine-3'-phosphate
  modified_base 4: mod_base = OTHER; note = 2'-O-methylcytidine-3'-phosphate
  modified_base 5: mod_base = OTHER; note = 2'-O-methyluridine-3'-phosphate
  modified_base 6: mod_base = OTHER; note = 2'-deoxy-2'-fluorocytidine-3'-phosphate
  modified_base 7: mod_base = OTHER; note = 2'-O-methylcytidine-3'-phosphate
  modified_base 8: mod_base = OTHER; note = 2'-O-methyladenosine-3'-phosphate
  modified_base 9: mod_base = OTHER; note = 2'-O-methylcytidine-3'-phosphate
  modified_base 10: mod_base = OTHER; note = 2'-O-methyladenosine-3'-phosphate
  modified_base 11: mod_base = OTHER; note = 2'-O-methylguanosine-3'-phosphate
  modified_base 12: mod_base = OTHER; note = 2'-O-methyladenosine-3'-phosphate
  modified_base 13: mod_base = OTHER; note = 2'-O-methyladenosine-3'-phosphate
  modified_base 14: mod_base = OTHER; note = 2'-deoxy-2'-fluoroguanosine-3'-phosphate
  modified_base 15: mod_base = OTHER; note = 2'-O-methyluridine-3'-phosphate
  modified_base 16: mod_base = OTHER; note = 2'-deoxy-2'-fluoroguanosine-3'-phosphate
  modified_base 17: mod_base = OTHER; note = 2'-O-methylcytidine-3'-phosphate
  modified_base 18: mod_base = OTHER; note = 2'-O-methyladenosine-3'-phosphate
  modified_base 19: mod_base = OTHER; note = 2'-O-methyluridine-3'-phosphate
  modified_base 20: mod_base = OTHER; note = 2'-O-methyluridine-3'-phosphate
  modified_base 21: mod_base = OTHER; note = 2'-O-methylcytidine-3'-phosphate
  modified_base 22: mod_base = OTHER; note = 2'-O-methylcytidine-3'-phosphate
  modified_base 23: mod_base = OTHER; note = 2'-O-methyladenosine
tgcctccacagaagtgcattcca

SEQ ID NO: 5111 - RNA, 23 nt, synthetic construct
  source 1..23: mol_type = other RNA
  modified_base 1: mod_base = OTHER; note = 2'-O-methyluridine-3'-phosphate 5'phosphate
  modified_base 2: mod_base = OTHER; note = 2'-deoxy-2'-fluoroadenosine-3'-phosphate
  modified_base 3: mod_base = OTHER; note = 2'-O-methyluridine-3'-phosphate
  modified_base 4: mod_base = OTHER; note = 2'-O-methyladenosine-3'-phosphate
  modified_base 5: mod_base = OTHER; note = 2'-O-methyluridine-3'-phosphate
  modified_base 6: mod_base = OTHER; note = 2'-deoxy-2'-fluorocytidine-3'-phosphate
  modified_base 7: mod_base = OTHER; note = 2'-O-methyladenosine-3'-phosphate
  modified_base 8: mod_base = OTHER; note = 2'-O-methyladenosine-3'-phosphate
  modified_base 9: mod_base = OTHER; note = 2'-O-methylguanosine-3'-phosphate
  modified_base 10: mod_base = OTHER; note = 2'-O-methylguanosine-3'-phosphate
  modified_base 11: mod_base = OTHER; note = 2'-O-methyluridine-3'-phosphate
  modified_base 12: mod_base = OTHER; note = 2'-O-methylguanosine-3'-phosphate
  modified_base 13: mod_base = OTHER; note = 2'-O-methylcytidine-3'-phosphate
  modified_base 14: mod_base = OTHER; note = 2'-deoxy-2'-fluorocytidine-3'-phosphate
  modified_base 15: mod_base = OTHER; note = 2'-O-methyluridine-3'-phosphate
  modified_base 16: mod_base = OTHER; note = 2'-deoxy-2'-fluorocytidine-3'-phosphate
  modified_base 17: mod_base = OTHER; note = 2'-O-methylcytidine-3'-phosphate
  modified_base 18: mod_base = OTHER; note = 2'-O-methyladenosine-3'-phosphate
  modified_base 19: mod_base = OTHER; note = 2'-O-methylcytidine-3'-phosphate
  modified_base 20: mod_base = OTHER; note = 2'-O-methyladenosine-3'-phosphate
  modified_base 21: mod_base = OTHER; note = 2'-O-methylguanosine-3'-phosphate
  modified_base 22: mod_base = OTHER; note = 2'-O-methyladenosine-3'-phosphate
  modified_base 23: mod_base = OTHER; note = 2'-O-methyladenosine
tatatcaaggtgcctccacagaa

SEQ ID NO: 5112 - RNA, 23 nt, synthetic construct
  source 1..23: mol_type = other RNA
  modified_base 1: mod_base = OTHER; note = 2'-O-methyluridine-3'-phosphate 5'phosphate
  modified_base 2: mod_base = OTHER; note = 2'-deoxy-2'-fluoroguanosine-3'-phosphate
  modified_base 3: mod_base = OTHER; note = 2'-O-methyladenosine-3'-phosphate
  modified_base 4: mod_base = OTHER; note = 2'-O-methyluridine-3'-phosphate
  modified_base 5: mod_base = OTHER; note = 2'-O-methyladenosine-3'-phosphate
  modified_base 6: mod_base = OTHER; note = 2'-deoxy-2'-fluorouridine-3'-phosphate
  modified_base 7: mod_base = OTHER; note = 2'-O-methylcytidine-3'-phosphate
  modified_base 8: mod_base = OTHER; note = 2'-O-methyladenosine-3'-phosphate
  modified_base 9: mod_base = OTHER; note = 2'-O-methyladenosine-3'-phosphate
  modified_base 10: mod_base = OTHER; note = 2'-O-methylguanosine-3'-phosphate
  modified_base 11: mod_base = OTHER; note = 2'-O-methylguanosine-3'-phosphate
  modified_base 12: mod_base = OTHER; note = 2'-O-methyluridine-3'-phosphate
  modified_base 13: mod_base = OTHER; note = 2'-O-methylguanosine-3'-phosphate
  modified_base 14: mod_base = OTHER; note = 2'-deoxy-2'-fluorocytidine-3'-phosphate
  modified_base 15: mod_base = OTHER; note = 2'-O-methylcytidine-3'-phosphate
  modified_base 16: mod_base = OTHER; note = 2'-deoxy-2'-fluorouridine-3'-phosphate
  modified_base 17: mod_base = OTHER; note = 2'-O-methylcytidine-3'-phosphate
  modified_base 18: mod_base = OTHER; note = 2'-O-methylcytidine-3'-phosphate
  modified_base 19: mod_base = OTHER; note = 2'-O-methyladenosine-3'-phosphate
  modified_base 20: mod_base = OTHER; note = 2'-O-methylcytidine-3'-phosphate
  modified_base 21: mod_base = OTHER; note = 2'-O-methyladenosine-3'-phosphate
  modified_base 22: mod_base = OTHER; note = 2'-O-methylguanosine-3'-phosphate
  modified_base 23: mod_base = OTHER; note = 2'-O-methyladenosine
tgatatcaaggtgcctccacaga

SEQ ID NO: 5113 - RNA, 23 nt, synthetic construct
  source 1..23: mol_type = other RNA
  modified_base 1: mod_base = OTHER; note = 2'-O-methyluridine-3'-phosphate 5'phosphate
  modified_base 2: mod_base = OTHER; note = 2'-deoxy-2'-fluoroguanosine-3'-phosphate
  modified_base 3: mod_base = OTHER; note = 2'-O-methylguanosine-3'-phosphate
  modified_base 4: mod_base = OTHER; note = 2'-O-methyladenosine-3'-phosphate
  modified_base 5: mod_base = OTHER; note = 2'-O-methyluridine-3'-phosphate
  modified_base 6: mod_base = OTHER; note = 2'-deoxy-2'-fluoroadenosine-3'-phosphate
  modified_base 7: mod_base = OTHER; note = 2'-O-methyluridine-3'-phosphate
  modified_base 8: mod_base = OTHER; note = 2'-O-methylcytidine-3'-phosphate
  modified_base 9: mod_base = OTHER; note = 2'-O-methyladenosine-3'-phosphate
  modified_base 10: mod_base = OTHER; note = 2'-O-methyladenosine-3'-phosphate
  modified_base 11: mod_base = OTHER; note = 2'-O-methylguanosine-3'-phosphate
  modified_base 12: mod_base = OTHER; note = 2'-O-methylguanosine-3'-phosphate
  modified_base 13: mod_base = OTHER; note = 2'-O-methyluridine-3'-phosphate
  modified_base 14: mod_base = OTHER; note = 2'-deoxy-2'-fluoroguanosine-3'-phosphate
  modified_base 15: mod_base = OTHER; note = 2'-O-methylcytidine-3'-phosphate
  modified_base 16: mod_base = OTHER; note = 2'-deoxy-2'-fluorocytidine-3'-phosphate
  modified_base 17: mod_base = OTHER; note = 2'-O-methyluridine-3'-phosphate
  modified_base 18: mod_base = OTHER; note = 2'-O-methylcytidine-3'-phosphate
  modified_base 19: mod_base = OTHER; note = 2'-O-methylcytidine-3'-phosphate
  modified_base 20: mod_base = OTHER; note = 2'-O-methyladenosine-3'-phosphate
  modified_base 21: mod_base = OTHER; note = 2'-O-methylcytidine-3'-phosphate
  modified_base 22: mod_base = OTHER; note = 2'-O-methyladenosine-3'-phosphate
  modified_base 23: mod_base = OTHER; note = 2'-O-methylguanosine
tggatatcaaggtgcctccacag

SEQ ID NO: 5114 - RNA, 23 nt, synthetic construct
  source 1..23: mol_type = other RNA
  modified_base 1: mod_base = OTHER; note = 2'-O-methyluridine-3'-phosphate 5'phosphate
  modified_base 2: mod_base = OTHER; note = 2'-deoxy-2'-fluoroadenosine-3'-phosphate
  modified_base 3: mod_base = OTHER; note = 2'-O-methyladenosine-3'-phosphate
  modified_base 4: mod_base = OTHER; note = 2'-O-methylguanosine-3'-phosphate
  modified_base 5: mod_base = OTHER; note = 2'-O-methylcytidine-3'-phosphate
  modified_base 6: mod_base = OTHER; note = 2'-deoxy-2'-fluoroadenosine-3'-phosphate
  modified_base 7: mod_base = OTHER; note = 2'-O-methylguanosine-3'-phosphate
  modified_base 8: mod_base = OTHER; note = 2'-O-methyluridine-3'-phosphate
  modified_base 9: mod_base = OTHER; note = 2'-O-methylguanosine-3'-phosphate
  modified_base 10: mod_base = OTHER; note = 2'-O-methylguanosine-3'-phosphate
  modified_base 11: mod_base = OTHER; note = 2'-O-methylguanosine-3'-phosphate
  modified_base 12: mod_base = OTHER; note = 2'-O-methylcytidine-3'-phosphate
  modified_base 13: mod_base = OTHER; note = 2'-O-methyladenosine-3'-phosphate
  modified_base 14: mod_base = OTHER; note = 2'-deoxy-2'-fluoroguanosine-3'-phosphate
  modified_base 15: mod_base = OTHER; note = 2'-O-methylcytidine-3'-phosphate
  modified_base 16: mod_base = OTHER; note = 2'-deoxy-2'-fluoroadenosine-3'-phosphate
  modified_base 17: mod_base = OTHER; note = 2'-O-methylguanosine-3'-phosphate
  modified_base 18: mod_base = OTHER; note = 2'-O-methyluridine-3'-phosphate
  modified_base 19: mod_base = OTHER; note = 2'-O-methylcytidine-3'-phosphate
  modified_base 20: mod_base = OTHER; note = 2'-O-methyladenosine-3'-phosphate
  modified_base 21: mod_base = OTHER; note = 2'-O-methyladenosine-3'-phosphate
  modified_base 22: mod_base = OTHER; note = 2'-O-methylcytidine-3'-phosphate
  modified_base 23: mod_base = OTHER; note = 2'-O-methyladenosine
taagcagtgggcagcagtcaaca

SEQ ID NO: 5115 - RNA, 23 nt, synthetic construct
  source 1..23: mol_type = other RNA
  modified_base 1: mod_base = OTHER; note = 2'-O-methyluridine-3'-phosphate 5'phosphate
  modified_base 2: mod_base = OTHER; note = 2'-deoxy-2'-fluorocytidine-3'-phosphate
  modified_base 3: mod_base = OTHER; note = 2'-O-methyladenosine-3'-phosphate
  modified_base 4: mod_base = OTHER; note = 2'-O-methyladenosine-3'-phosphate
  modified_base 5: mod_base = OTHER; note = 2'-O-methylguanosine-3'-phosphate
  modified_base 6: mod_base = OTHER; note = 2'-deoxy-2'-fluorocytidine-3'-phosphate
  modified_base 7: mod_base = OTHER; note = 2'-O-methyladenosine-3'-phosphate
  modified_base 8: mod_base = OTHER; note = 2'-O-methylguanosine-3'-phosphate
  modified_base 9: mod_base = OTHER; note = 2'-O-methyluridine-3'-phosphate
  modified_base 10: mod_base = OTHER; note = 2'-O-methylguanosine-3'-phosphate
  modified_base 11: mod_base = OTHER; note = 2'-O-methylguanosine-3'-phosphate
  modified_base 12: mod_base = OTHER; note = 2'-O-methylguanosine-3'-phosphate
  modified_base 13: mod_base = OTHER; note = 2'-O-methylcytidine-3'-phosphate
  modified_base 14: mod_base = OTHER; note = 2'-deoxy-2'-fluoroadenosine-3'-phosphate
  modified_base 15: mod_base = OTHER; note = 2'-O-methylguanosine-3'-phosphate
  modified_base 16: mod_base = OTHER; note = 2'-deoxy-2'-fluorocytidine-3'-phosphate
  modified_base 17: mod_base = OTHER; note = 2'-O-methyladenosine-3'-phosphate
  modified_base 18: mod_base = OTHER; note = 2'-O-methylguanosine-3'-phosphate
  modified_base 19: mod_base = OTHER; note = 2'-O-methyluridine-3'-phosphate
  modified_base 20: mod_base = OTHER; note = 2'-O-methylcytidine-3'-phosphate
  modified_base 21: mod_base = OTHER; note = 2'-O-methyladenosine-3'-phosphate
  modified_base 22: mod_base = OTHER; note = 2'-O-methyladenosine-3'-phosphate
  modified_base 23: mod_base = OTHER; note = 2'-O-methylcytidine
tcaagcagtgggcagcagtcaac

SEQ ID NO: 5116 - RNA, 23 nt, synthetic construct
  source 1..23: mol_type = other RNA
  modified_base 1: mod_base = OTHER; note = 2'-O-methyluridine-3'-phosphate 5'phosphate
  modified_base 2: mod_base = OTHER; note = 2'-deoxy-2'-fluorouridine-3'-phosphate
  modified_base 3: mod_base = OTHER; note = 2'-O-methylcytidine-3'-phosphate
  modified_base 4: mod_base = OTHER; note = 2'-O-methylcytidine-3'-phosphate
  modified_base 5: mod_base = OTHER; note = 2'-O-methyladenosine-3'-phosphate
  modified_base 6: mod_base = OTHER; note = 2'-deoxy-2'-fluoroadenosine-3'-phosphate
  modified_base 7: mod_base = OTHER; note = 2'-O-methylguanosine-3'-phosphate
  modified_base 8: mod_base = OTHER; note = 2'-O-methylcytidine-3'-phosphate
  modified_base 9: mod_base = OTHER; note = 2'-O-methyladenosine-3'-phosphate
  modified_base 10: mod_base = OTHER; note = 2'-O-methylguanosine-3'-phosphate
  modified_base 11: mod_base = OTHER; note = 2'-O-methyluridine-3'-phosphate
  modified_base 12: mod_base = OTHER; note = 2'-O-methylguanosine-3'-phosphate
  modified_base 13: mod_base = OTHER; note = 2'-O-methylguanosine-3'-phosphate
  modified_base 14: mod_base = OTHER; note = 2'-deoxy-2'-fluoroguanosine-3'-phosphate
  modified_base 15: mod_base = OTHER; note = 2'-O-methylcytidine-3'-phosphate
  modified_base 16: mod_base = OTHER; note = 2'-deoxy-2'-fluoroadenosine-3'-phosphate
  modified_base 17: mod_base = OTHER; note = 2'-O-methylguanosine-3'-phosphate
  modified_base 18: mod_base = OTHER; note = 2'-O-methylcytidine-3'-phosphate
  modified_base 19: mod_base = OTHER; note = 2'-O-methyladenosine-3'-phosphate
  modified_base 20: mod_base = OTHER; note = 2'-O-methylguanosine-3'-phosphate
  modified_base 21: mod_base = OTHER; note = 2'-O-methyluridine-3'-phosphate
  modified_base 22: mod_base = OTHER; note = 2'-O-methylcytidine-3'-phosphate
  modified_base 23: mod_base = OTHER; note = 2'-O-methyladenosine
ttccaagcagtgggcagcagtca

SEQ ID NO: 5117 - RNA, 23 nt, synthetic construct
  source 1..23: mol_type = other RNA
  modified_base 1: mod_base = OTHER; note = 2'-O-methyluridine-3'-phosphate 5'phosphate
  modified_base 2: mod_base = OTHER; note = 2'-deoxy-2'-fluorocytidine-3'-phosphate
  modified_base 3: mod_base = OTHER; note = 2'-O-methyluridine-3'-phosphate
  modified_base 4: mod_base = OTHER; note = 2'-O-methylcytidine-3'-phosphate
  modified_base 5: mod_base = OTHER; note = 2'-O-methylcytidine-3'-phosphate
  modified_base 6: mod_base = OTHER; note = 2'-deoxy-2'-fluoroadenosine-3'-phosphate
  modified_base 7: mod_base = OTHER; note = 2'-O-methyladenosine-3'-phosphate
  modified_base 8: mod_base = OTHER; note = 2'-O-methylguanosine-3'-phosphate
  modified_base 9: mod_base = OTHER; note = 2'-O-methylcytidine-3'-phosphate
  modified_base 10: mod_base = OTHER; note = 2'-O-methyladenosine-3'-phosphate
  modified_base 11: mod_base = OTHER; note = 2'-O-methylguanosine-3'-phosphate
  modified_base 12: mod_base = OTHER; note = 2'-O-methyluridine-3'-phosphate
  modified_base 13: mod_base = OTHER; note = 2'-O-methylguanosine-3'-phosphate
  modified_base 14: mod_base = OTHER; note = 2'-deoxy-2'-fluoroguanosine-3'-phosphate
  modified_base 15: mod_base = OTHER; note = 2'-O-methylguanosine-3'-phosphate
  modified_base 16: mod_base = OTHER; note = 2'-deoxy-2'-fluorocytidine-3'-phosphate
  modified_base 17: mod_base = OTHER; note = 2'-O-methyladenosine-3'-phosphate
  modified_base 18: mod_base = OTHER; note = 2'-O-methylguanosine-3'-phosphate
  modified_base 19: mod_base = OTHER; note = 2'-O-methylcytidine-3'-phosphate
  modified_base 20: mod_base = OTHER; note = 2'-O-methyladenosine-3'-phosphate
  modified_base 21: mod_base = OTHER; note = 2'-O-methylguanosine-3'-phosphate
  modified_base 22: mod_base = OTHER; note = 2'-O-methyluridine-3'-phosphate
  modified_base 23: mod_base = OTHER; note = 2'-O-methylcytidine
tctccaagcagtgggcagcagtc

SEQ ID NO: 5118 - RNA, 23 nt, synthetic construct
  source 1..23: mol_type = other RNA
  modified_base 1: mod_base = OTHER; note = 2'-O-methyluridine-3'-phosphate 5'phosphate
  modified_base 2: mod_base = OTHER; note = 2'-deoxy-2'-fluorouridine-3'-phosphate
  modified_base 3: mod_base = OTHER; note = 2'-O-methylcytidine-3'-phosphate
  modified_base 4: mod_base = OTHER; note = 2'-O-methyluridine-3'-phosphate
  modified_base 5: mod_base = OTHER; note = 2'-O-methylcytidine-3'-phosphate
  modified_base 6: mod_base = OTHER; note = 2'-deoxy-2'-fluorocytidine-3'-phosphate
  modified_base 7: mod_base = OTHER; note = 2'-O-methyladenosine-3'-phosphate
  modified_base 8: mod_base = OTHER; note = 2'-O-methyladenosine-3'-phosphate
  modified_base 9: mod_base = OTHER; note = 2'-O-methylguanosine-3'-phosphate
  modified_base 10: mod_base = OTHER; note = 2'-O-methylcytidine-3'-phosphate
  modified_base 11: mod_base = OTHER; note = 2'-O-methyladenosine-3'-phosphate
  modified_base 12: mod_base = OTHER; note = 2'-O-methylguanosine-3'-phosphate
  modified_base 13: mod_base = OTHER; note = 2'-O-methyluridine-3'-phosphate
  modified_base 14: mod_base = OTHER; note = 2'-deoxy-2'-fluoroguanosine-3'-phosphate
  modified_base 15: mod_base = OTHER; note = 2'-O-methylguanosine-3'-phosphate
  modified_base 16: mod_base = OTHER; note = 2'-deoxy-2'-fluoroguanosine-3'-phosphate
  modified_base 17: mod_base = OTHER; note = 2'-O-methylcytidine-3'-phosphate
  modified_base 18: mod_base = OTHER; note = 2'-O-methyladenosine-3'-phosphate
  modified_base 19: mod_base = OTHER; note = 2'-O-methylguanosine-3'-phosphate
  modified_base 20: mod_base = OTHER; note = 2'-O-methylcytidine-3'-phosphate
  modified_base 21: mod_base = OTHER; note = 2'-O-methyladenosine-3'-phosphate
  modified_base 22: mod_base = OTHER; note = 2'-O-methylguanosine-3'-phosphate
  modified_base 23: mod_base = OTHER; note = 2'-O-methyluridine
ttctccaagcagtgggcagcagt

SEQ ID NO: 5119 - RNA, 23 nt, synthetic construct
  source 1..23: mol_type = other RNA
  modified_base 1: mod_base = OTHER; note = 2'-O-methyluridine-3'-phosphate 5'phosphate
  modified_base 2: mod_base = OTHER; note = 2'-deoxy-2'-fluorocytidine-3'-phosphate
  modified_base 3: mod_base = OTHER; note = 2'-O-methyluridine-3'-phosphate
  modified_base 4: mod_base = OTHER; note = 2'-O-methyluridine-3'-phosphate
  modified_base 5: mod_base = OTHER; note = 2'-O-methylcytidine-3'-phosphate
  modified_base 6: mod_base = OTHER; note = 2'-deoxy-2'-fluorouridine-3'-phosphate
  modified_base 7: mod_base = OTHER; note = 2'-O-methylcytidine-3'-phosphate
  modified_base 8: mod_base = OTHER; note = 2'-O-methylcytidine-3'-phosphate
  modified_base 9: mod_base = OTHER; note = 2'-O-methyladenosine-3'-phosphate
  modified_base 10: mod_base = OTHER; note = 2'-O-methyladenosine-3'-phosphate
  modified_base 11: mod_base = OTHER; note = 2'-O-methylguanosine-3'-phosphate
  modified_base 12: mod_base = OTHER; note = 2'-O-methylcytidine-3'-phosphate
  modified_base 13: mod_base = OTHER; note = 2'-O-methyladenosine-3'-phosphate
  modified_base 14: mod_base = OTHER; note = 2'-deoxy-2'-fluoroguanosine-3'-phosphate
  modified_base 15: mod_base = OTHER; note = 2'-O-methyluridine-3'-phosphate
  modified_base 16: mod_base = OTHER; note = 2'-deoxy-2'-fluoroguanosine-3'-phosphate
  modified_base 17: mod_base = OTHER; note = 2'-O-methylguanosine-3'-phosphate
  modified_base 18: mod_base = OTHER; note = 2'-O-methylguanosine-3'-phosphate
  modified_base 19: mod_base = OTHER; note = 2'-O-methylcytidine-3'-phosphate
  modified_base 20: mod_base = OTHER; note = 2'-O-methyladenosine-3'-phosphate
  modified_base 21: mod_base = OTHER; note = 2'-O-methylguanosine-3'-phosphate
  modified_base 22: mod_base = OTHER; note = 2'-O-methylcytidine-3'-phosphate
  modified_base 23: mod_base = OTHER; note = 2'-O-methyladenosine
tcttctccaagcagtgggcagca

SEQ ID NO: 5120 - RNA, 23 nt, synthetic construct
  source 1..23: mol_type = other RNA
  modified_base 1: mod_base = OTHER; note = 2'-O-methyluridine-3'-phosphate 5'phosphate
  modified_base 2: mod_base = OTHER; note = 2'-deoxy-2'-fluoroadenosine-3'-phosphate
  modified_base 3: mod_base = OTHER; note = 2'-O-methylcytidine-3'-phosphate
  modified_base 4: mod_base = OTHER; note = 2'-O-methyluridine-3'-phosphate
  modified_base 5: mod_base = OTHER; note = 2'-O-methyluridine-3'-phosphate
  modified_base 6: mod_base = OTHER; note = 2'-deoxy-2'-fluorocytidine-3'-phosphate
  modified_base 7: mod_base = OTHER; note = 2'-O-methyluridine-3'-phosphate
  modified_base 8: mod_base = OTHER; note = 2'-O-methylcytidine-3'-phosphate
  modified_base 9: mod_base = OTHER; note = 2'-O-methylcytidine-3'-phosphate
  modified_base 10: mod_base = OTHER; note = 2'-O-methyladenosine-3'-phosphate
  modified_base 11: mod_base = OTHER; note = 2'-O-methyladenosine-3'-phosphate
  modified_base 12: mod_base = OTHER; note = 2'-O-methylguanosine-3'-phosphate
  modified_base 13: mod_base = OTHER; note = 2'-O-methylcytidine-3'-phosphate
  modified_base 14: mod_base = OTHER; note = 2'-deoxy-2'-fluoroadenosine-3'-phosphate
  modified_base 15: mod_base = OTHER; note = 2'-O-methylguanosine-3'-phosphate
  modified_base 16: mod_base = OTHER; note = 2'-deoxy-2'-fluorouridine-3'-phosphate
  modified_base 17: mod_base = OTHER; note = 2'-O-methylguanosine-3'-phosphate
  modified_base 18: mod_base = OTHER; note = 2'-O-methylguanosine-3'-phosphate
  modified_base 19: mod_base = OTHER; note = 2'-O-methylguanosine-3'-phosphate
  modified_base 20: mod_base = OTHER; note = 2'-O-methylcytidine-3'-phosphate
  modified_base 21: mod_base = OTHER; note = 2'-O-methyladenosine-3'-phosphate
  modified_base 22: mod_base = OTHER; note = 2'-O-methylguanosine-3'-phosphate
  modified_base 23: mod_base = OTHER; note = 2'-O-methylcytidine
tacttctccaagcagtgggcagc

SEQ ID NO: 5121 - RNA, 23 nt, synthetic construct
  source 1..23: mol_type = other RNA
  modified_base 1: mod_base = OTHER; note = 2'-O-methyluridine-3'-phosphate 5'phosphate
  modified_base 2: mod_base = OTHER; note = 2'-deoxy-2'-fluoroguanosine-3'-phosphate
  modified_base 3: mod_base = OTHER; note = 2'-O-methylguanosine-3'-phosphate
  modified_base 4: mod_base = OTHER; note = 2'-O-methyladenosine-3'-phosphate
  modified_base 5: mod_base = OTHER; note = 2'-O-methylcytidine-3'-phosphate
  modified_base 6: mod_base = OTHER; note = 2'-deoxy-2'-fluorouridine-3'-phosphate
  modified_base 7: mod_base = OTHER; note = 2'-O-methyluridine-3'-phosphate
  modified_base 8: mod_base = OTHER; note = 2'-O-methylcytidine-3'-phosphate
  modified_base 9: mod_base = OTHER; note = 2'-O-methyluridine-3'-phosphate
  modified_base 10: mod_base = OTHER; note = 2'-O-methylcytidine-3'-phosphate
  modified_base 11: mod_base = OTHER; note = 2'-O-methylcytidine-3'-phosphate
  modified_base 12: mod_base = OTHER; note = 2'-O-methyladenosine-3'-phosphate
  modified_base 13: mod_base = OTHER; note = 2'-O-methyladenosine-3'-phosphate
  modified_base 14: mod_base = OTHER; note = 2'-deoxy-2'-fluoroguanosine-3'-phosphate
  modified_base 15: mod_base = OTHER; note = 2'-O-methylcytidine-3'-phosphate
  modified_base 16: mod_base = OTHER; note = 2'-deoxy-2'-fluoroadenosine-3'-phosphate
  modified_base 17: mod_base = OTHER; note = 2'-O-methylguanosine-3'-phosphate
  modified_base 18: mod_base = OTHER; note = 2'-O-methyluridine-3'-phosphate
  modified_base 19: mod_base = OTHER; note = 2'-O-methylguanosine-3'-phosphate
  modified_base 20: mod_base = OTHER; note = 2'-O-methylguanosine-3'-phosphate
  modified_base 21: mod_base = OTHER; note = 2'-O-methylguanosine-3'-phosphate
  modified_base 22: mod_base = OTHER; note = 2'-O-methylcytidine-3'-phosphate
  modified_base 23: mod_base = OTHER; note = 2'-O-methyladenosine
tggacttctccaagcagtgggca

SEQ ID NO: 5122 - RNA, 23 nt, synthetic construct
  source 1..23: mol_type = other RNA
  modified_base 1: mod_base = OTHER; note = 2'-O-methyluridine-3'-phosphate 5'phosphate
  modified_base 2: mod_base = OTHER; note = 2'-deoxy-2'-fluoroadenosine-3'-phosphate
  modified_base 3: mod_base = OTHER; note = 2'-O-methyluridine-3'-phosphate
  modified_base 4: mod_base = OTHER; note = 2'-O-methyluridine-3'-phosphate
  modified_base 5: mod_base = OTHER; note = 2'-O-methylcytidine-3'-phosphate
  modified_base 6: mod_base = OTHER; note = 2'-deoxy-2'-fluoroadenosine-3'-phosphate
  modified_base 7: mod_base = OTHER; note = 2'-O-methylcytidine-3'-phosphate
  modified_base 8: mod_base = OTHER; note = 2'-O-methyluridine-3'-phosphate
  modified_base 9: mod_base = OTHER; note = 2'-O-methyluridine-3'-phosphate
  modified_base 10: mod_base = OTHER; note = 2'-O-methylcytidine-3'-phosphate
  modified_base 11: mod_base = OTHER; note = 2'-O-methyluridine-3'-phosphate
  modified_base 12: mod_base = OTHER; note = 2'-O-methyluridine-3'-phosphate
  modified_base 13: mod_base = OTHER; note = 2'-O-methylguanosine-3'-phosphate
  modified_base 14: mod_base = OTHER; note = 2'-deoxy-2'-fluoroguanosine-3'-phosphate
  modified_base 15: mod_base = OTHER; note = 2'-O-methyluridine-3'-phosphate
  modified_base 16: mod_base = OTHER; note = 2'-deoxy-2'-fluoroguanosine-3'-phosphate
  modified_base 17: mod_base = OTHER; note = 2'-O-methyluridine-3'-phosphate
  modified_base 18: mod_base = OTHER; note = 2'-O-methylguanosine-3'-phosphate
  modified_base 19: mod_base = OTHER; note = 2'-O-methylcytidine-3'-phosphate
  modified_base 20: mod_base = OTHER; note = 2'-O-methyladenosine-3'-phosphate
  modified_base 21: mod_base = OTHER; note = 2'-O-methylcytidine-3'-phosphate
  modified_base 22: mod_base = OTHER; note = 2'-O-methylcytidine-3'-phosphate
  modified_base 23: mod_base = OTHER; note = 2'-O-methylcytidine
tattcacttcttggtgtgcaccc

SEQ ID NO: 5123 - RNA, 23 nt, synthetic construct
  source 1..23: mol_type = other RNA
  modified_base 1: mod_base = OTHER; note = 2'-O-methyluridine-3'-phosphate 5'phosphate
  modified_base 2: mod_base = OTHER; note = 2'-deoxy-2'-fluoroadenosine-3'-phosphate
  modified_base 3: mod_base = OTHER; note = 2'-O-methylguanosine-3'-phosphate
  modified_base 4: mod_base = OTHER; note = 2'-O-methyladenosine-3'-phosphate
  modified_base 5: mod_base = OTHER; note = 2'-O-methyluridine-3'-phosphate
  modified_base 6: mod_base = OTHER; note = 2'-deoxy-2'-fluorouridine-3'-phosphate
  modified_base 7: mod_base = OTHER; note = 2'-O-methylcytidine-3'-phosphate
  modified_base 8: mod_base = OTHER; note = 2'-O-methyladenosine-3'-phosphate
  modified_base 9: mod_base = OTHER; note = 2'-O-methylcytidine-3'-phosphate
  modified_base 10: mod_base = OTHER; note = 2'-O-methyluridine-3'-phosphate
  modified_base 11: mod_base = OTHER; note = 2'-O-methyluridine-3'-phosphate
  modified_base 12: mod_base = OTHER; note = 2'-O-methylcytidine-3'-phosphate
  modified_base 13: mod_base = OTHER; note = 2'-O-methyluridine-3'-phosphate
  modified_base 14: mod_base = OTHER; note = 2'-deoxy-2'-fluorouridine-3'-phosphate
  modified_base 15: mod_base = OTHER; note = 2'-O-methylguanosine-3'-phosphate
  modified_base 16: mod_base = OTHER; note = 2'-deoxy-2'-fluoroguanosine-3'-phosphate
  modified_base 17: mod_base = OTHER; note = 2'-O-methyluridine-3'-phosphate
  modified_base 18: mod_base = OTHER; note = 2'-O-methylguanosine-3'-phosphate
  modified_base 19: mod_base = OTHER; note = 2'-O-methyluridine-3'-phosphate
  modified_base 20: mod_base = OTHER; note = 2'-O-methylguanosine-3'-phosphate
  modified_base 21: mod_base = OTHER; note = 2'-O-methylcytidine-3'-phosphate
  modified_base 22: mod_base = OTHER; note = 2'-O-methyladenosine-3'-phosphate
  modified_base 23: mod_base = OTHER; note = 2'-O-methylcytidine
tagattcacttcttggtgtgcac

SEQ ID NO: 5124 - RNA, 23 nt, synthetic construct
  source 1..23: mol_type = other RNA
  modified_base 1: mod_base = OTHER; note = 2'-O-methyluridine-3'-phosphate 5'phosphate
  modified_base 2: mod_base = OTHER; note = 2'-deoxy-2'-fluorocytidine-3'-phosphate
  modified_base 3: mod_base = OTHER; note = 2'-O-methylguanosine-3'-phosphate
  modified_base 4: mod_base = OTHER; note = 2'-O-methyladenosine-3'-phosphate
  modified_base 5: mod_base = OTHER; note = 2'-O-methylguanosine-3'-phosphate
  modified_base 6: mod_base = OTHER; note = 2'-deoxy-2'-fluoroadenosine-3'-phosphate
  modified_base 7: mod_base = OTHER; note = 2'-O-methyluridine-3'-phosphate
  modified_base 8: mod_base = OTHER; note = 2'-O-methyluridine-3'-phosphate
  modified_base 9: mod_base = OTHER; note = 2'-O-methylcytidine-3'-phosphate
  modified_base 10: mod_base = OTHER; note = 2'-O-methyladenosine-3'-phosphate
  modified_base 11: mod_base = OTHER; note = 2'-O-methylcytidine-3'-phosphate
  modified_base 12: mod_base = OTHER; note = 2'-O-methyluridine-3'-phosphate
  modified_base 13: mod_base = OTHER; note = 2'-O-methyluridine-3'-phosphate
  modified_base 14: mod_base = OTHER; note = 2'-deoxy-2'-fluorocytidine-3'-phosphate
  modified_base 15: mod_base = OTHER; note = 2'-O-methyluridine-3'-phosphate
  modified_base 16: mod_base = OTHER; note = 2'-deoxy-2'-fluorouridine-3'-phosphate
  modified_base 17: mod_base = OTHER; note = 2'-O-methylguanosine-3'-phosphate
  modified_base 18: mod_base = OTHER; note = 2'-O-methylguanosine-3'-phosphate
  modified_base 19: mod_base = OTHER; note = 2'-O-methyluridine-3'-phosphate
  modified_base 20: mod_base = OTHER; note = 2'-O-methylguanosine-3'-phosphate
  modified_base 21: mod_base = OTHER; note = 2'-O-methyluridine-3'-phosphate
  modified_base 22: mod_base = OTHER; note = 2'-O-methylguanosine-3'-phosphate
  modified_base 23: mod_base = OTHER; note = 2'-O-methylcytidine
tcgagattcacttcttggtgtgc

SEQ ID NO: 5125 - RNA, 23 nt, synthetic construct
  source 1..23: mol_type = other RNA
  modified_base 1: mod_base = OTHER; note = 2'-O-methyluridine-3'-phosphate 5'phosphate
  modified_base 2: mod_base = OTHER; note = 2'-deoxy-2'-fluorouridine-3'-phosphate
  modified_base 3: mod_base = OTHER; note = 2'-O-methylcytidine-3'-phosphate
  modified_base 4: mod_base = OTHER; note = 2'-O-methylguanosine-3'-phosphate
  modified_base 5: mod_base = OTHER; note = 2'-O-methyladenosine-3'-phosphate
  modified_base 6: mod_base = OTHER; note = 2'-deoxy-2'-fluoroguanosine-3'-phosphate
  modified_base 7: mod_base = OTHER; note = 2'-O-methyladenosine-3'-phosphate
  modified_base 8: mod_base = OTHER; note = 2'-O-methyluridine-3'-phosphate
  modified_base 9: mod_base = OTHER; note = 2'-O-methyluridine-3'-phosphate
  modified_base 10: mod_base = OTHER; note = 2'-O-methylcytidine-3'-phosphate
  modified_base 11: mod_base = OTHER; note = 2'-O-methyladenosine-3'-phosphate
  modified_base 12: mod_base = OTHER; note = 2'-O-methylcytidine-3'-phosphate
  modified_base 13: mod_base = OTHER; note = 2'-O-methyluridine-3'-phosphate
  modified_base 14: mod_base = OTHER; note = 2'-deoxy-2'-fluorouridine-3'-phosphate
  modified_base 15: mod_base = OTHER; note = 2'-O-methylcytidine-3'-phosphate
  modified_base 16: mod_base = OTHER; note = 2'-deoxy-2'-fluorouridine-3'-phosphate
  modified_base 17: mod_base = OTHER; note = 2'-O-methyluridine-3'-phosphate
  modified_base 18: mod_base = OTHER; note = 2'-O-methylguanosine-3'-phosphate
  modified_base 19: mod_base = OTHER; note = 2'-O-methylguanosine-3'-phosphate
  modified_base 20: mod_base = OTHER; note = 2'-O-methyluridine-3'-phosphate
  modified_base 21: mod_base = OTHER; note = 2'-O-methylguanosine-3'-phosphate
  modified_base 22: mod_base = OTHER; note = 2'-O-methyluridine-3'-phosphate
  modified_base 23: mod_base = OTHER; note = 2'-O-methylguanosine
ttcgagattcacttcttggtgtg

SEQ ID NO: 5126 - RNA, 23 nt, synthetic construct
  source 1..23: mol_type = other RNA
  modified_base 1: mod_base = OTHER; note = 2'-O-methyluridine-3'-phosphate 5'phosphate
  modified_base 2: mod_base = OTHER; note = 2'-deoxy-2'-fluorouridine-3'-phosphate
  modified_base 3: mod_base = OTHER; note = 2'-O-methyluridine-3'-phosphate
  modified_base 4: mod_base = OTHER; note = 2'-O-methylcytidine-3'-phosphate
  modified_base 5: mod_base = OTHER; note = 2'-O-methylguanosine-3'-phosphate
  modified_base 6: mod_base = OTHER; note = 2'-deoxy-2'-fluoroadenosine-3'-phosphate
  modified_base 7: mod_base = OTHER; note = 2'-O-methylguanosine-3'-phosphate
  modified_base 8: mod_base = OTHER; note = 2'-O-methyladenosine-3'-phosphate
  modified_base 9: mod_base = OTHER; note = 2'-O-methyluridine-3'-phosphate
  modified_base 10: mod_base = OTHER; note = 2'-O-methyluridine-3'-phosphate
  modified_base 11: mod_base = OTHER; note = 2'-O-methylcytidine-3'-phosphate
  modified_base 12: mod_base = OTHER; note = 2'-O-methyladenosine-3'-phosphate
  modified_base 13: mod_base = OTHER; note = 2'-O-methylcytidine-3'-phosphate
  modified_base 14: mod_base = OTHER; note = 2'-deoxy-2'-fluorouridine-3'-phosphate
  modified_base 15: mod_base = OTHER; note = 2'-O-methyluridine-3'-phosphate
  modified_base 16: mod_base = OTHER; note = 2'-deoxy-2'-fluorocytidine-3'-phosphate
  modified_base 17: mod_base = OTHER; note = 2'-O-methyluridine-3'-phosphate
  modified_base 18: mod_base = OTHER; note = 2'-O-methyluridine-3'-phosphate
  modified_base 19: mod_base = OTHER; note = 2'-O-methylguanosine-3'-phosphate
  modified_base 20: mod_base = OTHER; note = 2'-O-methylguanosine-3'-phosphate
  modified_base 21: mod_base = OTHER; note = 2'-O-methyluridine-3'-phosphate
  modified_base 22: mod_base = OTHER; note = 2'-O-methylguanosine-3'-phosphate
  modified_base 23: mod_base = OTHER; note = 2'-O-methyluridine
tttcgagattcacttcttggtgt

SEQ ID NO: 5127 - RNA, 23 nt, synthetic construct
  source 1..23: mol_type = other RNA
  modified_base 1: mod_base = OTHER; note = 2'-O-methyluridine-3'-phosphate 5'phosphate
  modified_base 2: mod_base = OTHER; note = 2'-deoxy-2'-fluoroadenosine-3'-phosphate
  modified_base 3: mod_base = OTHER; note = 2'-O-methyladenosine-3'-phosphate
  modified_base 4: mod_base = OTHER; note = 2'-O-methylcytidine-3'-phosphate
  modified_base 5: mod_base = OTHER; note = 2'-O-methyladenosine-3'-phosphate
  modified_base 6: mod_base = OTHER; note = 2'-deoxy-2'-fluorouridine-3'-phosphate
  modified_base 7: mod_base = OTHER; note = 2'-O-methylguanosine-3'-phosphate
  modified_base 8: mod_base = OTHER; note = 2'-O-methylcytidine-3'-phosphate
  modified_base 9: mod_base = OTHER; note = 2'-O-methylguanosine-3'-phosphate
  modified_base 10: mod_base = OTHER; note = 2'-O-methylguanosine-3'-phosphate
  modified_base 11: mod_base = OTHER; note = 2'-O-methyluridine-3'-phosphate
  modified_base 12: mod_base = OTHER; note = 2'-O-methyluridine-3'-phosphate
  modified_base 13: mod_base = OTHER; note = 2'-O-methylcytidine-3'-phosphate
  modified_base 14: mod_base = OTHER; note = 2'-deoxy-2'-fluoroguanosine-3'-phosphate
  modified_base 15: mod_base = OTHER; note = 2'-O-methyladenosine-3'-phosphate
  modified_base 16: mod_base = OTHER; note = 2'-deoxy-2'-fluoroguanosine-3'-phosphate
  modified_base 17: mod_base = OTHER; note = 2'-O-methyladenosine-3'-phosphate
  modified_base 18: mod_base = OTHER; note = 2'-O-methyluridine-3'-phosphate
  modified_base 19: mod_base = OTHER; note = 2'-O-methyluridine-3'-phosphate
  modified_base 20: mod_base = OTHER; note = 2'-O-methylcytidine-3'-phosphate
  modified_base 21: mod_base = OTHER; note = 2'-O-methyladenosine-3'-phosphate
  modified_base 22: mod_base = OTHER; note = 2'-O-methylcytidine-3'-phosphate
  modified_base 23: mod_base = OTHER; note = 2'-O-methyluridine
taacatgcggttcgagattcact

SEQ ID NO: 5128 - RNA, 23 nt, synthetic construct
  source 1..23: mol_type = other RNA
  modified_base 1: mod_base = OTHER; note = 2'-O-methyluridine-3'-phosphate 5'phosphate
  modified_base 2: mod_base = OTHER; note = 2'-deoxy-2'-fluorouridine-3'-phosphate
  modified_base 3: mod_base = OTHER; note = 2'-O-methylguanosine-3'-phosphate
  modified_base 4: mod_base = OTHER; note = 2'-O-methyladenosine-3'-phosphate
  modified_base 5: mod_base = OTHER; note = 2'-O-methyladenosine-3'-phosphate
  modified_base 6: mod_base = OTHER; note = 2'-deoxy-2'-fluorocytidine-3'-phosphate
  modified_base 7: mod_base = OTHER; note = 2'-O-methyladenosine-3'-phosphate
  modified_base 8: mod_base = OTHER; note = 2'-O-methyluridine-3'-phosphate
  modified_base 9: mod_base = OTHER; note = 2'-O-methylguanosine-3'-phosphate
  modified_base 10: mod_base = OTHER; note = 2'-O-methylcytidine-3'-phosphate
  modified_base 11: mod_base = OTHER; note = 2'-O-methylguanosine-3'-phosphate
  modified_base 12: mod_base = OTHER; note = 2'-O-methylguanosine-3'-phosphate
  modified_base 13: mod_base = OTHER; note = 2'-O-methyluridine-3'-phosphate
  modified_base 14: mod_base = OTHER; note = 2'-deoxy-2'-fluorouridine-3'-phosphate
  modified_base 15: mod_base = OTHER; note = 2'-O-methylcytidine-3'-phosphate
  modified_base 16: mod_base = OTHER; note = 2'-deoxy-2'-fluoroguanosine-3'-phosphate
  modified_base 17: mod_base = OTHER; note = 2'-O-methyladenosine-3'-phosphate
  modified_base 18: mod_base = OTHER; note = 2'-O-methylguanosine-3'-phosphate
  modified_base 19: mod_base = OTHER; note = 2'-O-methyladenosine-3'-phosphate
  modified_base 20: mod_base = OTHER; note = 2'-O-methyluridine-3'-phosphate
  modified_base 21: mod_base = OTHER; note = 2'-O-methyluridine-3'-phosphate
  modified_base 22: mod_base = OTHER; note = 2'-O-methylcytidine-3'-phosphate
  modified_base 23: mod_base = OTHER; note = 2'-O-methyladenosine
ttgaacatgcggttcgagattca

SEQ ID NO: 5129 - RNA, 23 nt, synthetic construct
  source 1..23: mol_type = other RNA
  modified_base 1: mod_base = OTHER; note = 2'-O-methyluridine-3'-phosphate 5'phosphate
  modified_base 2: mod_base = OTHER; note = 2'-deoxy-2'-fluorouridine-3'-phosphate
  modified_base 3: mod_base = OTHER; note = 2'-O-methyluridine-3'-phosphate
  modified_base 4: mod_base = OTHER; note = 2'-O-methyluridine-3'-phosphate
  modified_base 5: mod_base = OTHER; note = 2'-O-methylcytidine-3'-phosphate
  modified_base 6: mod_base = OTHER; note = 2'-deoxy-2'-fluorocytidine-3'-phosphate
  modified_base 7: mod_base = OTHER; note = 2'-O-methyluridine-3'-phosphate
  modified_base 8: mod_base = OTHER; note = 2'-O-methylguanosine-3'-phosphate
  modified_base 9: mod_base = OTHER; note = 2'-O-methyladenosine-3'-phosphate
  modified_base 10: mod_base = OTHER; note = 2'-O-methyladenosine-3'-phosphate
  modified_base 11: mod_base = OTHER; note = 2'-O-methylcytidine-3'-phosphate
  modified_base 12: mod_base = OTHER; note = 2'-O-methyladenosine-3'-phosphate
  modified_base 13: mod_base = OTHER; note = 2'-O-methyluridine-3'-phosphate
  modified_base 14: mod_base = OTHER; note = 2'-deoxy-2'-fluoroguanosine-3'-phosphate
  modified_base 15: mod_base = OTHER; note = 2'-O-methylcytidine-3'-phosphate
  modified_base 16: mod_base = OTHER; note = 2'-deoxy-2'-fluoroguanosine-3'-phosphate
  modified_base 17: mod_base = OTHER; note = 2'-O-methylguanosine-3'-phosphate
  modified_base 18: mod_base = OTHER; note = 2'-O-methyluridine-3'-phosphate
  modified_base 19: mod_base = OTHER; note = 2'-O-methyluridine-3'-phosphate
  modified_base 20: mod_base = OTHER; note = 2'-O-methylcytidine-3'-phosphate
  modified_base 21: mod_base = OTHER; note = 2'-O-methylguanosine-3'-phosphate
  modified_base 22: mod_base = OTHER; note = 2'-O-methyladenosine-3'-phosphate
  modified_base 23: mod_base = OTHER; note = 2'-O-methylguanosine
ttttcctgaacatgcggttcgag

SEQ ID NO: 5130 - RNA, 23 nt, synthetic construct
  source 1..23: mol_type = other RNA
  modified_base 1: mod_base = OTHER; note = 2'-O-methyluridine-3'-phosphate 5'phosphate
  modified_base 2: mod_base = OTHER; note = 2'-deoxy-2'-fluoroadenosine-3'-phosphate
  modified_base 3: mod_base = OTHER; note = 2'-O-methyluridine-3'-phosphate
  modified_base 4: mod_base = OTHER; note = 2'-O-methyluridine-3'-phosphate
  modified_base 5: mod_base = OTHER; note = 2'-O-methyluridine-3'-phosphate
  modified_base 6: mod_base = OTHER; note = 2'-deoxy-2'-fluorocytidine-3'-phosphate
  modified_base 7: mod_base = OTHER; note = 2'-O-methylcytidine-3'-phosphate
  modified_base 8: mod_base = OTHER; note = 2'-O-methyluridine-3'-phosphate
  modified_base 9: mod_base = OTHER; note = 2'-O-methylguanosine-3'-phosphate
  modified_base 10: mod_base = OTHER; note = 2'-O-methyladenosine-3'-phosphate
  modified_base 11: mod_base = OTHER; note = 2'-O-methyladenosine-3'-phosphate
  modified_base 12: mod_base = OTHER; note = 2'-O-methylcytidine-3'-phosphate
  modified_base 13: mod_base = OTHER; note = 2'-O-methyladenosine-3'-phosphate
  modified_base 14: mod_base = OTHER; note = 2'-deoxy-2'-fluorouridine-3'-phosphate
  modified_base 15: mod_base = OTHER; note = 2'-O-methylguanosine-3'-phosphate
  modified_base 16: mod_base = OTHER; note = 2'-deoxy-2'-fluorocytidine-3'-phosphate
  modified_base 17: mod_base = OTHER; note = 2'-O-methylguanosine-3'-phosphate
  modified_base 18: mod_base = OTHER; note = 2'-O-methylguanosine-3'-phosphate
  modified_base 19: mod_base = OTHER; note = 2'-O-methyluridine-3'-phosphate
  modified_base 20: mod_base = OTHER; note = 2'-O-methyluridine-3'-phosphate
  modified_base 21: mod_base = OTHER; note = 2'-O-methylcytidine-3'-phosphate
  modified_base 22: mod_base = OTHER; note = 2'-O-methylguanosine-3'-phosphate
  modified_base 23: mod_base = OTHER; note = 2'-O-methyladenosine
tatttcctgaacatgcggttcga

SEQ ID NO: 5131 - RNA, 23 nt, synthetic construct
  source 1..23: mol_type = other RNA
  modified_base 1: mod_base = OTHER; note = 2'-O-methyluridine-3'-phosphate 5'phosphate
  modified_base 2: mod_base = OTHER; note = 2'-deoxy-2'-fluorouridine-3'-phosphate
  modified_base 3: mod_base = OTHER; note = 2'-O-methyladenosine-3'-phosphate
  modified_base 4: mod_base = OTHER; note = 2'-O-methyluridine-3'-phosphate
  modified_base 5: mod_base = OTHER; note = 2'-O-methyluridine-3'-phosphate
  modified_base 6: mod_base = OTHER; note = 2'-deoxy-2'-fluorouridine-3'-phosphate
  modified_base 7: mod_base = OTHER; note = 2'-O-methylcytidine-3'-phosphate
  modified_base 8: mod_base = OTHER; note = 2'-O-methylcytidine-3'-phosphate
  modified_base 9: mod_base = OTHER; note = 2'-O-methyluridine-3'-phosphate
  modified_base 10: mod_base = OTHER; note = 2'-O-methylguanosine-3'-phosphate
  modified_base 11: mod_base = OTHER; note = 2'-O-methyladenosine-3'-phosphate
  modified_base 12: mod_base = OTHER; note = 2'-O-methyladenosine-3'-phosphate
  modified_base 13: mod_base = OTHER; note = 2'-O-methylcytidine-3'-phosphate
  modified_base 14: mod_base = OTHER; note = 2'-deoxy-2'-fluoroadenosine-3'-phosphate
  modified_base 15: mod_base = OTHER; note = 2'-O-methyluridine-3'-phosphate
  modified_base 16: mod_base = OTHER; note = 2'-deoxy-2'-fluoroguanosine-3'-phosphate
  modified_base 17: mod_base = OTHER; note = 2'-O-methylcytidine-3'-phosphate
  modified_base 18: mod_base = OTHER; note = 2'-O-methylguanosine-3'-phosphate
  modified_base 19: mod_base = OTHER; note = 2'-O-methylguanosine-3'-phosphate
  modified_base 20: mod_base = OTHER; note = 2'-O-methyluridine-3'-phosphate
  modified_base 21: mod_base = OTHER; note = 2'-O-methyluridine-3'-phosphate
  modified_base 22: mod_base = OTHER; note = 2'-O-methylcytidine-3'-phosphate
  modified_base 23: mod_base = OTHER; note = 2'-O-methylguanosine
ttatttcctgaacatgcggttcg

SEQ ID NO: 5132 - RNA, 23 nt, synthetic construct
  source 1..23: mol_type = other RNA
  modified_base 1: mod_base = OTHER; note = 2'-O-methyluridine-3'-phosphate 5'phosphate
  modified_base 2: mod_base = OTHER; note = 2'-deoxy-2'-fluorocytidine-3'-phosphate
  modified_base 3: mod_base = OTHER; note = 2'-O-methyluridine-3'-phosphate
  modified_base 4: mod_base = OTHER; note = 2'-O-methyladenosine-3'-phosphate
  modified_base 5: mod_base = OTHER; note = 2'-O-methyluridine-3'-phosphate
  modified_base 6: mod_base = OTHER; note = 2'-deoxy-2'-fluorouridine-3'-phosphate
  modified_base 7: mod_base = OTHER; note = 2'-O-methyluridine-3'-phosphate
  modified_base 8: mod_base = OTHER; note = 2'-O-methylcytidine-3'-phosphate
  modified_base 9: mod_base = OTHER; note = 2'-O-methylcytidine-3'-phosphate
  modified_base 10: mod_base = OTHER; note = 2'-O-methyluridine-3'-phosphate
  modified_base 11: mod_base = OTHER; note = 2'-O-methylguanosine-3'-phosphate
  modified_base 12: mod_base = OTHER; note = 2'-O-methyladenosine-3'-phosphate
  modified_base 13: mod_base = OTHER; note = 2'-O-methyladenosine-3'-phosphate
  modified_base 14: mod_base = OTHER; note = 2'-deoxy-2'-fluorocytidine-3'-phosphate
  modified_base 15: mod_base = OTHER; note = 2'-O-methyladenosine-3'-phosphate
  modified_base 16: mod_base = OTHER; note = 2'-deoxy-2'-fluorouridine-3'-phosphate
  modified_base 17: mod_base = OTHER; note = 2'-O-methylguanosine-3'-phosphate
  modified_base 18: mod_base = OTHER; note = 2'-O-methylcytidine-3'-phosphate
  modified_base 19: mod_base = OTHER; note = 2'-O-methylguanosine-3'-phosphate
  modified_base 20: mod_base = OTHER; note = 2'-O-methylguanosine-3'-phosphate
  modified_base 21: mod_base = OTHER; note = 2'-O-methyluridine-3'-phosphate
  modified_base 22: mod_base = OTHER; note = 2'-O-methyluridine-3'-phosphate
  modified_base 23: mod_base = OTHER; note = 2'-O-methylcytidine
tctatttcctgaacatgcggttc

SEQ ID NO: 5133 - RNA, 23 nt, synthetic construct
  source 1..23: mol_type = other RNA
  modified_base 1: mod_base = OTHER; note = 2'-O-methyluridine-3'-phosphate 5'phosphate
  modified_base 2: mod_base = OTHER; note = 2'-deoxy-2'-fluorouridine-3'-phosphate
  modified_base 3: mod_base = OTHER; note = 2'-O-methylcytidine-3'-phosphate
  modified_base 4: mod_base = OTHER; note = 2'-O-methyluridine-3'-phosphate
  modified_base 5: mod_base = OTHER; note = 2'-O-methyladenosine-3'-phosphate
  modified_base 6: mod_base = OTHER; note = 2'-deoxy-2'-fluorouridine-3'-phosphate
  modified_base 7: mod_base = OTHER; note = 2'-O-methyluridine-3'-phosphate
  modified_base 8: mod_base = OTHER; note = 2'-O-methyluridine-3'-phosphate
  modified_base 9: mod_base = OTHER; note = 2'-O-methylcytidine-3'-phosphate
  modified_base 10: mod_base = OTHER; note = 2'-O-methylcytidine-3'-phosphate
  modified_base 11: mod_base = OTHER; note = 2'-O-methyluridine-3'-phosphate
  modified_base 12: mod_base = OTHER; note = 2'-O-methylguanosine-3'-phosphate
  modified_base 13: mod_base = OTHER; note = 2'-O-methyladenosine-3'-phosphate
  modified_base 14: mod_base = OTHER; note = 2'-deoxy-2'-fluoroadenosine-3'-phosphate
  modified_base 15: mod_base = OTHER; note = 2'-O-methylcytidine-3'-phosphate
  modified_base 16: mod_base = OTHER; note = 2'-deoxy-2'-fluoroadenosine-3'-phosphate
  modified_base 17: mod_base = OTHER; note = 2'-O-methyluridine-3'-phosphate
  modified_base 18: mod_base = OTHER; note = 2'-O-methylguanosine-3'-phosphate
  modified_base 19: mod_base = OTHER; note = 2'-O-methylcytidine-3'-phosphate
  modified_base 20: mod_base = OTHER; note = 2'-O-methylguanosine-3'-phosphate
  modified_base 21: mod_base = OTHER; note = 2'-O-methylguanosine-3'-phosphate
  modified_base 22: mod_base = OTHER; note = 2'-O-methyluridine-3'-phosphate
  modified_base 23: mod_base = OTHER; note = 2'-O-methyluridine
ttctatttcctgaacatgcggtt

SEQ ID NO: 5134 - RNA, 23 nt, synthetic construct
  source 1..23: mol_type = other RNA
  modified_base 1: mod_base = OTHER; note = 2'-O-methyluridine-3'-phosphate 5'phosphate
  modified_base 2: mod_base = OTHER; note = 2'-deoxy-2'-fluorouridine-3'-phosphate
  modified_base 3: mod_base = OTHER; note = 2'-O-methylcytidine-3'-phosphate
  modified_base 4: mod_base = OTHER; note = 2'-O-methyluridine-3'-phosphate
  modified_base 5: mod_base = OTHER; note = 2'-O-methyluridine-3'-phosphate
  modified_base 6: mod_base = OTHER; note = 2'-deoxy-2'-fluorouridine-3'-phosphate
  modified_base 7: mod_base = OTHER; note = 2'-O-methyluridine-3'-phosphate
  modified_base 8: mod_base = OTHER; note = 2'-O-methylcytidine-3'-phosphate
  modified_base 9: mod_base = OTHER; note = 2'-O-methylguanosine-3'-phosphate
  modified_base 10: mod_base = OTHER; note = 2'-O-methyluridine-3'-phosphate
  modified_base 11: mod_base = OTHER; note = 2'-O-methylguanosine-3'-phosphate
  modified_base 12: mod_base = OTHER; note = 2'-O-methyluridine-3'-phosphate
  modified_base 13: mod_base = OTHER; note = 2'-O-methylguanosine-3'-phosphate
  modified_base 14: mod_base = OTHER; note = 2'-deoxy-2'-fluoroguanosine-3'-phosphate
  modified_base 15: mod_base = OTHER; note = 2'-O-methylguanosine-3'-phosphate
  modified_base 16: mod_base = OTHER; note = 2'-deoxy-2'-fluorocytidine-3'-phosphate
  modified_base 17: mod_base = OTHER; note = 2'-O-methyluridine-3'-phosphate
  modified_base 18: mod_base = OTHER; note = 2'-O-methylcytidine-3'-phosphate
  modified_base 19: mod_base = OTHER; note = 2'-O-methylcytidine-3'-phosphate
  modified_base 20: mod_base = OTHER; note = 2'-O-methyladenosine-3'-phosphate
  modified_base 21: mod_base = OTHER; note = 2'-O-methyladenosine-3'-phosphate
  modified_base 22: mod_base = OTHER; note = 2'-O-methylguanosine-3'-phosphate
  modified_base 23: mod_base = OTHER; note = 2'-O-methyladenosine
ttcttttcgtgtgggctccaaga

SEQ ID NO: 5135 - RNA, 23 nt, synthetic construct
  source 1..23: mol_type = other RNA
  modified_base 1: mod_base = OTHER; note = 2'-O-methyluridine-3'-phosphate 5'phosphate
  modified_base 2: mod_base = OTHER; note = 2'-deoxy-2'-fluoroadenosine-3'-phosphate
  modified_base 3: mod_base = OTHER; note = 2'-O-methyluridine-3'-phosphate
  modified_base 4: mod_base = OTHER; note = 2'-O-methylcytidine-3'-phosphate
  modified_base 5: mod_base = OTHER; note = 2'-O-methyluridine-3'-phosphate
  modified_base 6: mod_base = OTHER; note = 2'-deoxy-2'-fluorouridine-3'-phosphate
  modified_base 7: mod_base = OTHER; note = 2'-O-methyluridine-3'-phosphate
  modified_base 8: mod_base = OTHER; note = 2'-O-methyluridine-3'-phosphate
  modified_base 9: mod_base = OTHER; note = 2'-O-methylcytidine-3'-phosphate
  modified_base 10: mod_base = OTHER; note = 2'-O-methylguanosine-3'-phosphate
  modified_base 11: mod_base = OTHER; note = 2'-O-methyluridine-3'-phosphate
  modified_base 12: mod_base = OTHER; note = 2'-O-methylguanosine-3'-phosphate
  modified_base 13: mod_base = OTHER; note = 2'-O-methyluridine-3'-phosphate
  modified_base 14: mod_base = OTHER; note = 2'-deoxy-2'-fluoroguanosine-3'-phosphate
  modified_base 15: mod_base = OTHER; note = 2'-O-methylguanosine-3'-phosphate
  modified_base 16: mod_base = OTHER; note = 2'-deoxy-2'-fluoroguanosine-3'-phosphate
  modified_base 17: mod_base = OTHER; note = 2'-O-methylcytidine-3'-phosphate
  modified_base 18: mod_base = OTHER; note = 2'-O-methyluridine-3'-phosphate
  modified_base 19: mod_base = OTHER; note = 2'-O-methylcytidine-3'-phosphate
  modified_base 20: mod_base = OTHER; note = 2'-O-methylcytidine-3'-phosphate
  modified_base 21: mod_base = OTHER; note = 2'-O-methyladenosine-3'-phosphate
  modified_base 22: mod_base = OTHER; note = 2'-O-methyladenosine-3'-phosphate
  modified_base 23: mod_base = OTHER; note = 2'-O-methylguanosine
tatcttttcgtgtgggctccaag

SEQ ID NO: 5136 - RNA, 23 nt, synthetic construct
  source 1..23: mol_type = other RNA
  modified_base 1: mod_base = OTHER; note = 2'-O-methyluridine-3'-phosphate 5'phosphate
  modified_base 2: mod_base = OTHER; note = 2'-deoxy-2'-fluoroadenosine-3'-phosphate
  modified_base 3: mod_base = OTHER; note = 2'-O-methyluridine-3'-phosphate
  modified_base 4: mod_base = OTHER; note = 2'-O-methyladenosine-3'-phosphate
  modified_base 5: mod_base = OTHER; note = 2'-O-methyluridine-3'-phosphate
  modified_base 6: mod_base = OTHER; note = 2'-deoxy-2'-fluorocytidine-3'-phosphate
  modified_base 7: mod_base = OTHER; note = 2'-O-methyluridine-3'-phosphate
  modified_base 8: mod_base = OTHER; note = 2'-O-methyluridine-3'-phosphate
  modified_base 9: mod_base = OTHER; note = 2'-O-methyluridine-3'-phosphate
  modified_base 10: mod_base = OTHER; note = 2'-O-methyluridine-3'-phosphate
  modified_base 11: mod_base = OTHER; note = 2'-O-methylcytidine-3'-phosphate
  modified_base 12: mod_base = OTHER; note = 2'-O-methylguanosine-3'-phosphate
  modified_base 13: mod_base = OTHER; note = 2'-O-methyluridine-3'-phosphate
  modified_base 14: mod_base = OTHER; note = 2'-deoxy-2'-fluoroguanosine-3'-phosphate
  modified_base 15: mod_base = OTHER; note = 2'-O-methyluridine-3'-phosphate
  modified_base 16: mod_base = OTHER; note = 2'-deoxy-2'-fluoroguanosine-3'-phosphate
  modified_base 17: mod_base = OTHER; note = 2'-O-methylguanosine-3'-phosphate
  modified_base 18: mod_base = OTHER; note = 2'-O-methylguanosine-3'-phosphate
  modified_base 19: mod_base = OTHER; note = 2'-O-methylcytidine-3'-phosphate
  modified_base 20: mod_base = OTHER; note = 2'-O-methyluridine-3'-phosphate
  modified_base 21: mod_base = OTHER; note = 2'-O-methylcytidine-3'-phosphate
  modified_base 22: mod_base = OTHER; note = 2'-O-methylcytidine-3'-phosphate
  modified_base 23: mod_base = OTHER; note = 2'-O-methyladenosine
tatatcttttcgtgtgggctcca

SEQ ID NO: 5137 - RNA, 23 nt, synthetic construct
  source 1..23: mol_type = other RNA
  modified_base 1: mod_base = OTHER; note = 2'-O-methyluridine-3'-phosphate 5'phosphate
  modified_base 2: mod_base = OTHER; note = 2'-deoxy-2'-fluoroadenosine-3'-phosphate
  modified_base 3: mod_base = OTHER; note = 2'-O-methyladenosine-3'-phosphate
  modified_base 4: mod_base = OTHER; note = 2'-O-methyluridine-3'-phosphate
  modified_base 5: mod_base = OTHER; note = 2'-O-methyladenosine-3'-phosphate
  modified_base 6: mod_base = OTHER; note = 2'-deoxy-2'-fluorouridine-3'-phosphate
  modified_base 7: mod_base = OTHER; note = 2'-O-methylcytidine-3'-phosphate
  modified_base 8: mod_base = OTHER; note = 2'-O-methyluridine-3'-phosphate
  modified_base 9: mod_base = OTHER; note = 2'-O-methyluridine-3'-phosphate
  modified_base 10: mod_base = OTHER; note = 2'-O-methyluridine-3'-phosphate
  modified_base 11: mod_base = OTHER; note = 2'-O-methyluridine-3'-phosphate
  modified_base 12: mod_base = OTHER; note = 2'-O-methylcytidine-3'-phosphate
  modified_base 13: mod_base = OTHER; note = 2'-O-methylguanosine-3'-phosphate
  modified_base 14: mod_base = OTHER; note = 2'-deoxy-2'-fluorouridine-3'-phosphate
  modified_base 15: mod_base = OTHER; note = 2'-O-methylguanosine-3'-phosphate
  modified_base 16: mod_base = OTHER; note = 2'-deoxy-2'-fluorouridine-3'-phosphate
  modified_base 17: mod_base = OTHER; note = 2'-O-methylguanosine-3'-phosphate
  modified_base 18: mod_base = OTHER; note = 2'-O-methylguanosine-3'-phosphate
  modified_base 19: mod_base = OTHER; note = 2'-O-methylguanosine-3'-phosphate
  modified_base 20: mod_base = OTHER; note = 2'-O-methylcytidine-3'-phosphate
  modified_base 21: mod_base = OTHER; note = 2'-O-methyluridine-3'-phosphate
  modified_base 22: mod_base = OTHER; note = 2'-O-methylcytidine-3'-phosphate
  modified_base 23: mod_base = OTHER; note = 2'-O-methylcytidine
taatatcttttcgtgtgggctcc

SEQ ID NO: 5138 - RNA, 23 nt, synthetic construct
  source 1..23: mol_type = other RNA
  modified_base 1: mod_base = OTHER; note = 2'-O-methyluridine-3'-phosphate 5'phosphate
  modified_base 2: mod_base = OTHER; note = 2'-deoxy-2'-fluorocytidine-3'-phosphate
  modified_base 3: mod_base = OTHER; note = 2'-O-methyladenosine-3'-phosphate
  modified_base 4: mod_base = OTHER; note = 2'-O-methyladenosine-3'-phosphate
  modified_base 5: mod_base = OTHER; note = 2'-O-methyluridine-3'-phosphate
  modified_base 6: mod_base = OTHER; note = 2'-deoxy-2'-fluoroadenosine-3'-phosphate
  modified_base 7: mod_base = OTHER; note = 2'-O-methyluridine-3'-phosphate
  modified_base 8: mod_base = OTHER; note = 2'-O-methylcytidine-3'-phosphate
  modified_base 9: mod_base = OTHER; note = 2'-O-methyluridine-3'-phosphate
  modified_base 10: mod_base = OTHER; note = 2'-O-methyluridine-3'-phosphate
  modified_base 11: mod_base = OTHER; note = 2'-O-methyluridine-3'-phosphate
  modified_base 12: mod_base = OTHER; note = 2'-O-methyluridine-3'-phosphate
  modified_base 13: mod_base = OTHER; note = 2'-O-methylcytidine-3'-phosphate
  modified_base 14: mod_base = OTHER; note = 2'-deoxy-2'-fluoroguanosine-3'-phosphate
  modified_base 15: mod_base = OTHER; note = 2'-O-methyluridine-3'-phosphate
  modified_base 16: mod_base = OTHER; note = 2'-deoxy-2'-fluoroguanosine-3'-phosphate
  modified_base 17: mod_base = OTHER; note = 2'-O-methyluridine-3'-phosphate
  modified_base 18: mod_base = OTHER; note = 2'-O-methylguanosine-3'-phosphate
  modified_base 19: mod_base = OTHER; note = 2'-O-methylguanosine-3'-phosphate
  modified_base 20: mod_base = OTHER; note = 2'-O-methylguanosine-3'-phosphate
  modified_base 21: mod_base = OTHER; note = 2'-O-methylcytidine-3'-phosphate
  modified_base 22: mod_base = OTHER; note = 2'-O-methyluridine-3'-phosphate
  modified_base 23: mod_base = OTHER; note = 2'-O-methylcytidine
tcaatatcttttcgtgtgggctc

SEQ ID NO: 5139 - RNA, 23 nt, synthetic construct
  source 1..23: mol_type = other RNA
  modified_base 1: mod_base = OTHER; note = 2'-O-methyluridine-3'-phosphate 5'phosphate
  modified_base 2: mod_base = OTHER; note = 2'-deoxy-2'-fluoroguanosine-3'-phosphate
  modified_base 3: mod_base = OTHER; note = 2'-O-methylcytidine-3'-phosphate
  modified_base 4: mod_base = OTHER; note = 2'-O-methyladenosine-3'-phosphate
  modified_base 5: mod_base = OTHER; note = 2'-O-methyladenosine-3'-phosphate
  modified_base 6: mod_base = OTHER; note = 2'-deoxy-2'-fluorouridine-3'-phosphate
  modified_base 7: mod_base = OTHER; note = 2'-O-methyladenosine-3'-phosphate
  modified_base 8: mod_base = OTHER; note = 2'-O-methyluridine-3'-phosphate
  modified_base 9: mod_base = OTHER; note = 2'-O-methylcytidine-3'-phosphate
  modified_base 10: mod_base = OTHER; note = 2'-O-methyluridine-3'-phosphate
  modified_base 11: mod_base = OTHER; note = 2'-O-methyluridine-3'-phosphate
  modified_base 12: mod_base = OTHER; note = 2'-O-methyluridine-3'-phosphate
  modified_base 13: mod_base = OTHER; note = 2'-O-methyluridine-3'-phosphate
  modified_base 14: mod_base = OTHER; note = 2'-deoxy-2'-fluorocytidine-3'-phosphate
  modified_base 15: mod_base = OTHER; note = 2'-O-methylguanosine-3'-phosphate
  modified_base 16: mod_base = OTHER; note = 2'-deoxy-2'-fluorouridine-3'-phosphate
  modified_base 17: mod_base = OTHER; note = 2'-O-methylguanosine-3'-phosphate
  modified_base 18: mod_base = OTHER; note = 2'-O-methyluridine-3'-phosphate
  modified_base 19: mod_base = OTHER; note = 2'-O-methylguanosine-3'-phosphate
  modified_base 20: mod_base = OTHER; note = 2'-O-methylguanosine-3'-phosphate
  modified_base 21: mod_base = OTHER; note = 2'-O-methylguanosine-3'-phosphate
  modified_base 22: mod_base = OTHER; note = 2'-O-methylcytidine-3'-phosphate
  modified_base 23: mod_base = OTHER; note = 2'-O-methyluridine
tgcaatatcttttcgtgtgggct

SEQ ID NO: 5140 - RNA, 23 nt, synthetic construct
  source 1..23: mol_type = other RNA
  modified_base 1: mod_base = OTHER; note = 2'-O-methyluridine-3'-phosphate 5'phosphate
  modified_base 2: mod_base = OTHER; note = 2'-deoxy-2'-fluoroguanosine-3'-phosphate
  modified_base 3: mod_base = OTHER; note = 2'-O-methylguanosine-3'-phosphate
  modified_base 4: mod_base = OTHER; note = 2'-O-methylcytidine-3'-phosphate
  modified_base 5: mod_base = OTHER; note = 2'-O-methyladenosine-3'-phosphate
  modified_base 6: mod_base = OTHER; note = 2'-deoxy-2'-fluoroadenosine-3'-phosphate
  modified_base 7: mod_base = OTHER; note = 2'-O-methyluridine-3'-phosphate
  modified_base 8: mod_base = OTHER; note = 2'-O-methyladenosine-3'-phosphate
  modified_base 9: mod_base = OTHER; note = 2'-O-methyluridine-3'-phosphate
  modified_base 10: mod_base = OTHER; note = 2'-O-methylcytidine-3'-phosphate
  modified_base 11: mod_base = OTHER; note = 2'-O-methyluridine-3'-phosphate
  modified_base 12: mod_base = OTHER; note = 2'-O-methyluridine-3'-phosphate
  modified_base 13: mod_base = OTHER; note = 2'-O-methyluridine-3'-phosphate
  modified_base 14: mod_base = OTHER; note = 2'-deoxy-2'-fluorouridine-3'-phosphate
  modified_base 15: mod_base = OTHER; note = 2'-O-methylcytidine-3'-phosphate
  modified_base 16: mod_base = OTHER; note = 2'-deoxy-2'-fluoroguanosine-3'-phosphate
  modified_base 17: mod_base = OTHER; note = 2'-O-methyluridine-3'-phosphate
  modified_base 18: mod_base = OTHER; note = 2'-O-methylguanosine-3'-phosphate
  modified_base 19: mod_base = OTHER; note = 2'-O-methyluridine-3'-phosphate
  modified_base 20: mod_base = OTHER; note = 2'-O-methylguanosine-3'-phosphate
  modified_base 21: mod_base = OTHER; note = 2'-O-methylguanosine-3'-phosphate
  modified_base 22: mod_base = OTHER; note = 2'-O-methylguanosine-3'-phosphate
  modified_base 23: mod_base = OTHER; note = 2'-O-methylcytidine
tggcaatatcttttcgtgtgggc

SEQ ID NO: 5141 - RNA, 23 nt, synthetic construct
  source 1..23: mol_type = other RNA
  modified_base 1: mod_base = OTHER; note = 2'-O-methyluridine-3'-phosphate 5'phosphate
  modified_base 2: mod_base = OTHER; note = 2'-deoxy-2'-fluoroadenosine-3'-phosphate
  modified_base 3: mod_base = OTHER; note = 2'-O-methylguanosine-3'-phosphate
  modified_base 4: mod_base = OTHER; note = 2'-O-methylguanosine-3'-phosphate
  modified_base 5: mod_base = OTHER; note = 2'-O-methylcytidine-3'-phosphate
  modified_base 6: mod_base = OTHER; note = 2'-deoxy-2'-fluoroadenosine-3'-phosphate
  modified_base 7: mod_base = OTHER; note = 2'-O-methyladenosine-3'-phosphate
  modified_base 8: mod_base = OTHER; note = 2'-O-methyluridine-3'-phosphate
  modified_base 9: mod_base = OTHER; note = 2'-O-methyladenosine-3'-phosphate
  modified_base 10: mod_base = OTHER; note = 2'-O-methyluridine-3'-phosphate
  modified_base 11: mod_base = OTHER; note = 2'-O-methylcytidine-3'-phosphate
  modified_base 12: mod_base = OTHER; note = 2'-O-methyluridine-3'-phosphate
  modified_base 13: mod_base = OTHER; note = 2'-O-methyluridine-3'-phosphate
  modified_base 14: mod_base = OTHER; note = 2'-deoxy-2'-fluorouridine-3'-phosphate
  modified_base 15: mod_base = OTHER; note = 2'-O-methyluridine-3'-phosphate
  modified_base 16: mod_base = OTHER; note = 2'-deoxy-2'-fluorocytidine-3'-phosphate
  modified_base 17: mod_base = OTHER; note = 2'-O-methylguanosine-3'-phosphate
  modified_base 18: mod_base = OTHER; note = 2'-O-methyluridine-3'-phosphate
  modified_base 19: mod_base = OTHER; note = 2'-O-methylguanosine-3'-phosphate
  modified_base 20: mod_base = OTHER; note = 2'-O-methyluridine-3'-phosphate
  modified_base 21: mod_base = OTHER; note = 2'-O-methylguanosine-3'-phosphate
  modified_base 22: mod_base = OTHER; note = 2'-O-methylguanosine-3'-phosphate
  modified_base 23: mod_base = OTHER; note = 2'-O-methylguanosine
taggcaatatcttttcgtgtggg

SEQ ID NO: 5142 - RNA, 23 nt, synthetic construct
  source 1..23: mol_type = other RNA
  modified_base 1: mod_base = OTHER; note = 2'-O-methyluridine-3'-phosphate 5'phosphate
  modified_base 2: mod_base = OTHER; note = 2'-deoxy-2'-fluoroadenosine-3'-phosphate
  modified_base 3: mod_base = OTHER; note = 2'-O-methyladenosine-3'-phosphate
  modified_base 4: mod_base = OTHER; note = 2'-O-methylguanosine-3'-phosphate
  modified_base 5: mod_base = OTHER; note = 2'-O-methylguanosine-3'-phosphate
  modified_base 6: mod_base = OTHER; note = 2'-deoxy-2'-fluorocytidine-3'-phosphate
  modified_base 7: mod_base = OTHER; note = 2'-O-methyladenosine-3'-phosphate
  modified_base 8: mod_base = OTHER; note = 2'-O-methyladenosine-3'-phosphate
  modified_base 9: mod_base = OTHER; note = 2'-O-methyluridine-3'-phosphate
  modified_base 10: mod_base = OTHER; note = 2'-O-methyladenosine-3'-phosphate
  modified_base 11: mod_base = OTHER; note = 2'-O-methyluridine-3'-phosphate
  modified_base 12: mod_base = OTHER; note = 2'-O-methylcytidine-3'-phosphate
  modified_base 13: mod_base = OTHER; note = 2'-O-methyluridine-3'-phosphate
  modified_base 14: mod_base = OTHER; note = 2'-deoxy-2'-fluorouridine-3'-phosphate
  modified_base 15: mod_base = OTHER; note = 2'-O-methyluridine-3'-phosphate
  modified_base 16: mod_base = OTHER; note = 2'-deoxy-2'-fluorouridine-3'-phosphate
  modified_base 17: mod_base = OTHER; note = 2'-O-methylcytidine-3'-phosphate
  modified_base 18: mod_base = OTHER; note = 2'-O-methylguanosine-3'-phosphate
  modified_base 19: mod_base = OTHER; note = 2'-O-methyluridine-3'-phosphate
  modified_base 20: mod_base = OTHER; note = 2'-O-methylguanosine-3'-phosphate
  modified_base 21: mod_base = OTHER; note = 2'-O-methyluridine-3'-phosphate
  modified_base 22: mod_base = OTHER; note = 2'-O-methylguanosine-3'-phosphate
  modified_base 23: mod_base = OTHER; note = 2'-O-methylguanosine
taaggcaatatcttttcgtgtgg

SEQ ID NO: 5143 - RNA, 23 nt, synthetic construct
  source 1..23: mol_type = other RNA
  modified_base 1: mod_base = OTHER; note = 2'-O-methyluridine-3'-phosphate 5'phosphate
  modified_base 2: mod_base = OTHER; note = 2'-deoxy-2'-fluorocytidine-3'-phosphate
  modified_base 3: mod_base = OTHER; note = 2'-O-methyladenosine-3'-phosphate
  modified_base 4: mod_base = OTHER; note = 2'-O-methyladenosine-3'-phosphate
  modified_base 5: mod_base = OTHER; note = 2'-O-methylguanosine-3'-phosphate
  modified_base 6: mod_base = OTHER; note = 2'-deoxy-2'-fluoroguanosine-3'-phosphate
  modified_base 7: mod_base = OTHER; note = 2'-O-methylcytidine-3'-phosphate
  modified_base 8: mod_base = OTHER; note = 2'-O-methyladenosine-3'-phosphate
  modified_base 9: mod_base = OTHER; note = 2'-O-methyladenosine-3'-phosphate
  modified_base 10: mod_base = OTHER; note = 2'-O-methyluridine-3'-phosphate
  modified_base 11: mod_base = OTHER; note = 2'-O-methyladenosine-3'-phosphate
  modified_base 12: mod_base = OTHER; note = 2'-O-methyluridine-3'-phosphate
  modified_base 13: mod_base = OTHER; note = 2'-O-methylcytidine-3'-phosphate
  modified_base 14: mod_base = OTHER; note = 2'-deoxy-2'-fluorouridine-3'-phosphate
  modified_base 15: mod_base = OTHER; note = 2'-O-methyluridine-3'-phosphate
  modified_base 16: mod_base = OTHER; note = 2'-deoxy-2'-fluorouridine-3'-phosphate
  modified_base 17: mod_base = OTHER; note = 2'-O-methyluridine-3'-phosphate
  modified_base 18: mod_base = OTHER; note = 2'-O-methylcytidine-3'-phosphate
  modified_base 19: mod_base = OTHER; note = 2'-O-methylguanosine-3'-phosphate
  modified_base 20: mod_base = OTHER; note = 2'-O-methyluridine-3'-phosphate
  modified_base 21: mod_base = OTHER; note = 2'-O-methylguanosine-3'-phosphate
  modified_base 22: mod_base = OTHER; note = 2'-O-methyluridine-3'-phosphate
  modified_base 23: mod_base = OTHER; note = 2'-O-methylguanosine
tcaaggcaatatcttttcgtgtg

SEQ ID NO: 5144 - RNA, 23 nt, synthetic construct
  source 1..23: mol_type = other RNA
  modified_base 1: mod_base = OTHER; note = 2'-O-methyluridine-3'-phosphate 5'phosphate
  modified_base 2: mod_base = OTHER; note = 2'-deoxy-2'-fluoroguanosine-3'-phosphate
  modified_base 3: mod_base = OTHER; note = 2'-O-methylcytidine-3'-phosphate
  modified_base 4: mod_base = OTHER; note = 2'-O-methyladenosine-3'-phosphate
  modified_base 5: mod_base = OTHER; note = 2'-O-methyladenosine-3'-phosphate
  modified_base 6: mod_base = OTHER; note = 2'-deoxy-2'-fluoroguanosine-3'-phosphate
  modified_base 7: mod_base = OTHER; note = 2'-O-methylguanosine-3'-phosphate
  modified_base 8: mod_base = OTHER; note = 2'-O-methylcytidine-3'-phosphate
  modified_base 9: mod_base = OTHER; note = 2'-O-methyladenosine-3'-phosphate
  modified_base 10: mod_base = OTHER; note = 2'-O-methyladenosine-3'-phosphate
  modified_base 11: mod_base = OTHER; note = 2'-O-methyluridine-3'-phosphate
  modified_base 12: mod_base = OTHER; note = 2'-O-methyladenosine-3'-phosphate
  modified_base 13: mod_base = OTHER; note = 2'-O-methyluridine-3'-phosphate
  modified_base 14: mod_base = OTHER; note = 2'-deoxy-2'-fluorocytidine-3'-phosphate
  modified_base 15: mod_base = OTHER; note = 2'-O-methyluridine-3'-phosphate
  modified_base 16: mod_base = OTHER; note = 2'-deoxy-2'-fluorouridine-3'-phosphate
  modified_base 17: mod_base = OTHER; note = 2'-O-methyluridine-3'-phosphate
  modified_base 18: mod_base = OTHER; note = 2'-O-methyluridine-3'-phosphate
  modified_base 19: mod_base = OTHER; note = 2'-O-methylcytidine-3'-phosphate
  modified_base 20: mod_base = OTHER; note = 2'-O-methylguanosine-3'-phosphate
  modified_base 21: mod_base = OTHER; note = 2'-O-methyluridine-3'-phosphate
  modified_base 22: mod_base = OTHER; note = 2'-O-methylguanosine-3'-phosphate
  modified_base 23: mod_base = OTHER; note = 2'-O-methyluridine
tgcaaggcaatatcttttcgtgt

SEQ ID NO: 5145 - RNA, 23 nt, synthetic construct
  source 1..23: mol_type = other RNA
  modified_base 1: mod_base = OTHER; note = 2'-O-methyluridine-3'-phosphate 5'phosphate
  modified_base 2: mod_base = OTHER; note = 2'-deoxy-2'-fluoroadenosine-3'-phosphate
  modified_base 3: mod_base = OTHER; note = 2'-O-methylguanosine-3'-phosphate
  modified_base 4: mod_base = OTHER; note = 2'-O-methylcytidine-3'-phosphate
  modified_base 5: mod_base = OTHER; note = 2'-O-methyladenosine-3'-phosphate
  modified_base 6: mod_base = OTHER; note = 2'-deoxy-2'-fluoroadenosine-3'-phosphate
  modified_base 7: mod_base = OTHER; note = 2'-O-methylguanosine-3'-phosphate
  modified_base 8: mod_base = OTHER; note = 2'-O-methylguanosine-3'-phosphate
  modified_base 9: mod_base = OTHER; note = 2'-O-methylcytidine-3'-phosphate
  modified_base 10: mod_base = OTHER; note = 2'-O-methyladenosine-3'-phosphate
  modified_base 11: mod_base = OTHER; note = 2'-O-methyladenosine-3'-phosphate
  modified_base 12: mod_base = OTHER; note = 2'-O-methyluridine-3'-phosphate
  modified_base 13: mod_base = OTHER; note = 2'-O-methyladenosine-3'-phosphate
  modified_base 14: mod_base = OTHER; note = 2'-deoxy-2'-fluorouridine-3'-phosphate
  modified_base 15: mod_base = OTHER; note = 2'-O-methylcytidine-3'-phosphate
  modified_base 16: mod_base = OTHER; note = 2'-deoxy-2'-fluorouridine-3'-phosphate
  modified_base 17: mod_base = OTHER; note = 2'-O-methyluridine-3'-phosphate
  modified_base 18: mod_base = OTHER; note = 2'-O-methyluridine-3'-phosphate
  modified_base 19: mod_base = OTHER; note = 2'-O-methyluridine-3'-phosphate
  modified_base 20: mod_base = OTHER; note = 2'-O-methylcytidine-3'-phosphate
  modified_base 21: mod_base = OTHER; note = 2'-O-methylguanosine-3'-phosphate
  modified_base 22: mod_base = OTHER; note = 2'-O-methyluridine-3'-phosphate
  modified_base 23: mod_base = OTHER; note = 2'-O-methylguanosine
tagcaaggcaatatcttttcgtg

SEQ ID NO: 5146 - RNA, 23 nt, synthetic construct
  source 1..23: mol_type = other RNA
  modified_base 1: mod_base = OTHER; note = 2'-O-methyluridine-3'-phosphate 5'phosphate
  modified_base 2: mod_base = OTHER; note = 2'-deoxy-2'-fluorouridine-3'-phosphate
  modified_base 3: mod_base = OTHER; note = 2'-O-methyladenosine-3'-phosphate
  modified_base 4: mod_base = OTHER; note = 2'-O-methylguanosine-3'-phosphate
  modified_base 5: mod_base = OTHER; note = 2'-O-methylcytidine-3'-phosphate
  modified_base 6: mod_base = OTHER; note = 2'-deoxy-2'-fluoroadenosine-3'-phosphate
  modified_base 7: mod_base = OTHER; note = 2'-O-methyladenosine-3'-phosphate
  modified_base 8: mod_base = OTHER; note = 2'-O-methylguanosine-3'-phosphate
  modified_base 9: mod_base = OTHER; note = 2'-O-methylguanosine-3'-phosphate
  modified_base 10: mod_base = OTHER; note = 2'-O-methylcytidine-3'-phosphate
  modified_base 11: mod_base = OTHER; note = 2'-O-methyladenosine-3'-phosphate
  modified_base 12: mod_base = OTHER; note = 2'-O-methyladenosine-3'-phosphate
  modified_base 13: mod_base = OTHER; note = 2'-O-methyluridine-3'-phosphate
  modified_base 14: mod_base = OTHER; note = 2'-deoxy-2'-fluoroadenosine-3'-phosphate
  modified_base 15: mod_base = OTHER; note = 2'-O-methyluridine-3'-phosphate
  modified_base 16: mod_base = OTHER; note = 2'-deoxy-2'-fluorocytidine-3'-phosphate
  modified_base 17: mod_base = OTHER; note = 2'-O-methyluridine-3'-phosphate
  modified_base 18: mod_base = OTHER; note = 2'-O-methyluridine-3'-phosphate
  modified_base 19: mod_base = OTHER; note = 2'-O-methyluridine-3'-phosphate
  modified_base 20: mod_base = OTHER; note = 2'-O-methyluridine-3'-phosphate
  modified_base 21: mod_base = OTHER; note = 2'-O-methylcytidine-3'-phosphate
  modified_base 22: mod_base = OTHER; note = 2'-O-methylguanosine-3'-phosphate
  modified_base 23: mod_base = OTHER; note = 2'-O-methyluridine
ttagcaaggcaatatcttttcgt

SEQ ID NO: 5147 - RNA, 23 nt, synthetic construct
  source 1..23: mol_type = other RNA
  modified_base 1: mod_base = OTHER; note = 2'-O-methyluridine-3'-phosphate 5'phosphate
  modified_base 2: mod_base = OTHER; note = 2'-deoxy-2'-fluorouridine-3'-phosphate
  modified_base 3: mod_base = OTHER; note = 2'-O-methyluridine-3'-phosphate
  modified_base 4: mod_base = OTHER; note = 2'-O-methyladenosine-3'-phosphate
  modified_base 5: mod_base = OTHER; note = 2'-O-methylguanosine-3'-phosphate
  modified_base 6: mod_base = OTHER; note = 2'-deoxy-2'-fluorocytidine-3'-phosphate
  modified_base 7: mod_base = OTHER; note = 2'-O-methyladenosine-3'-phosphate
  modified_base 8: mod_base = OTHER; note = 2'-O-methyladenosine-3'-phosphate
  modified_base 9: mod_base = OTHER; note = 2'-O-methylguanosine-3'-phosphate
  modified_base 10: mod_base = OTHER; note = 2'-O-methylguanosine-3'-phosphate
  modified_base 11: mod_base = OTHER; note = 2'-O-methylcytidine-3'-phosphate
  modified_base 12: mod_base = OTHER; note = 2'-O-methyladenosine-3'-phosphate
  modified_base 13: mod_base = OTHER; note = 2'-O-methyladenosine-3'-phosphate
  modified_base 14: mod_base = OTHER; note = 2'-deoxy-2'-fluorouridine-3'-phosphate
  modified_base 15: mod_base = OTHER; note = 2'-O-methyladenosine-3'-phosphate
  modified_base 16: mod_base = OTHER; note = 2'-deoxy-2'-fluorouridine-3'-phosphate
  modified_base 17: mod_base = OTHER; note = 2'-O-methylcytidine-3'-phosphate
  modified_base 18: mod_base = OTHER; note = 2'-O-methyluridine-3'-phosphate
  modified_base 19: mod_base = OTHER; note = 2'-O-methyluridine-3'-phosphate
  modified_base 20: mod_base = OTHER; note = 2'-O-methyluridine-3'-phosphate
  modified_base 21: mod_base = OTHER; note = 2'-O-methyluridine-3'-phosphate
  modified_base 22: mod_base = OTHER; note = 2'-O-methylcytidine-3'-phosphate
  modified_base 23: mod_base = OTHER; note = 2'-O-methylguanosine
tttagcaaggcaatatcttttcg

SEQ ID NO: 5148 - RNA, 23 nt, synthetic construct
  source 1..23: mol_type = other RNA
  modified_base 1: mod_base = OTHER; note = 2'-O-methyluridine-3'-phosphate 5'phosphate
  modified_base 2: mod_base = OTHER; note = 2'-deoxy-2'-fluorouridine-3'-phosphate
  modified_base 3: mod_base = OTHER; note = 2'-O-methyluridine-3'-phosphate
  modified_base 4: mod_base = OTHER; note = 2'-O-methyluridine-3'-phosphate
  modified_base 5: mod_base = OTHER; note = 2'-O-methyladenosine-3'-phosphate
  modified_base 6: mod_base = OTHER; note = 2'-deoxy-2'-fluoroguanosine-3'-phosphate
  modified_base 7: mod_base = OTHER; note = 2'-O-methylcytidine-3'-phosphate
  modified_base 8: mod_base = OTHER; note = 2'-O-methyladenosine-3'-phosphate
  modified_base 9: mod_base = OTHER; note = 2'-O-methyladenosine-3'-phosphate
  modified_base 10: mod_base = OTHER; note = 2'-O-methylguanosine-3'-phosphate
  modified_base 11: mod_base = OTHER; note = 2'-O-methylguanosine-3'-phosphate
  modified_base 12: mod_base = OTHER; note = 2'-O-methylcytidine-3'-phosphate
  modified_base 13: mod_base = OTHER; note = 2'-O-methyladenosine-3'-phosphate
  modified_base 14: mod_base = OTHER; note = 2'-deoxy-2'-fluoroadenosine-3'-phosphate
  modified_base 15: mod_base = OTHER; note = 2'-O-methyluridine-3'-phosphate
  modified_base 16: mod_base = OTHER; note = 2'-deoxy-2'-fluoroadenosine-3'-phosphate
  modified_base 17: mod_base = OTHER; note = 2'-O-methyluridine-3'-phosphate
  modified_base 18: mod_base = OTHER; note = 2'-O-methylcytidine-3'-phosphate
  modified_base 19: mod_base = OTHER; note = 2'-O-methyluridine-3'-phosphate
  modified_base 20: mod_base = OTHER; note = 2'-O-methyluridine-3'-phosphate
  modified_base 21: mod_base = OTHER; note = 2'-O-methyluridine-3'-phosphate
  modified_base 22: mod_base = OTHER; note = 2'-O-methyluridine-3'-phosphate
  modified_base 23: mod_base = OTHER; note = 2'-O-methylcytidine
ttttagcaaggcaatatcttttc

SEQ ID NO: 5149 - RNA, 23 nt, synthetic construct
  source 1..23: mol_type = other RNA
  modified_base 1: mod_base = OTHER; note = 2'-O-methyluridine-3'-phosphate 5'phosphate
  modified_base 2: mod_base = OTHER; note = 2'-deoxy-2'-fluorocytidine-3'-phosphate
  modified_base 3: mod_base = OTHER; note = 2'-O-methyluridine-3'-phosphate
  modified_base 4: mod_base = OTHER; note = 2'-O-methyluridine-3'-phosphate
  modified_base 5: mod_base = OTHER; note = 2'-O-methyluridine-3'-phosphate
  modified_base 6: mod_base = OTHER; note = 2'-deoxy-2'-fluoroadenosine-3'-phosphate
  modified_base 7: mod_base = OTHER; note = 2'-O-methylguanosine-3'-phosphate
  modified_base 8: mod_base = OTHER; note = 2'-O-methylcytidine-3'-phosphate
  modified_base 9: mod_base = OTHER; note = 2'-O-methyladenosine-3'-phosphate
  modified_base 10: mod_base = OTHER; note = 2'-O-methyladenosine-3'-phosphate
  modified_base 11: mod_base = OTHER; note = 2'-O-methylguanosine-3'-phosphate
  modified_base 12: mod_base = OTHER; note = 2'-O-methylguanosine-3'-phosphate
  modified_base 13: mod_base = OTHER; note = 2'-O-methylcytidine-3'-phosphate
  modified_base 14: mod_base = OTHER; note = 2'-deoxy-2'-fluoroadenosine-3'-phosphate
  modified_base 15: mod_base = OTHER; note = 2'-O-methyladenosine-3'-phosphate
  modified_base 16: mod_base = OTHER; note = 2'-deoxy-2'-fluorouridine-3'-phosphate
  modified_base 17: mod_base = OTHER; note = 2'-O-methyladenosine-3'-phosphate
  modified_base 18: mod_base = OTHER; note = 2'-O-methyluridine-3'-phosphate
  modified_base 19: mod_base = OTHER; note = 2'-O-methylcytidine-3'-phosphate
  modified_base 20: mod_base = OTHER; note = 2'-O-methyluridine-3'-phosphate
  modified_base 21: mod_base = OTHER; note = 2'-O-methyluridine-3'-phosphate
  modified_base 22: mod_base = OTHER; note = 2'-O-methyluridine-3'-phosphate
  modified_base 23: mod_base = OTHER; note = 2'-O-methyluridine
tctttagcaaggcaatatctttt

SEQ ID NO: 5150 - RNA, 23 nt, synthetic construct
  source 1..23: mol_type = other RNA
  modified_base 1: mod_base = OTHER; note = 2'-O-methyluridine-3'-phosphate 5'phosphate
  modified_base 2: mod_base = OTHER; note = 2'-deoxy-2'-fluoroguanosine-3'-phosphate
  modified_base 3: mod_base = OTHER; note = 2'-O-methylcytidine-3'-phosphate
  modified_base 4: mod_base = OTHER; note = 2'-O-methyluridine-3'-phosphate
  modified_base 5: mod_base = OTHER; note = 2'-O-methyluridine-3'-phosphate
  modified_base 6: mod_base = OTHER; note = 2'-deoxy-2'-fluorouridine-3'-phosphate
  modified_base 7: mod_base = OTHER; note = 2'-O-methyladenosine-3'-phosphate
  modified_base 8: mod_base = OTHER; note = 2'-O-methylguanosine-3'-phosphate
  modified_base 9: mod_base = OTHER; note = 2'-O-methylcytidine-3'-phosphate
  modified_base 10: mod_base = OTHER; note = 2'-O-methyladenosine-3'-phosphate
  modified_base 11: mod_base = OTHER; note = 2'-O-methyladenosine-3'-phosphate
  modified_base 12: mod_base = OTHER; note = 2'-O-methylguanosine-3'-phosphate
  modified_base 13: mod_base = OTHER; note = 2'-O-methylguanosine-3'-phosphate
  modified_base 14: mod_base = OTHER; note = 2'-deoxy-2'-fluorocytidine-3'-phosphate
  modified_base 15: mod_base = OTHER; note = 2'-O-methyladenosine-3'-phosphate
  modified_base 16: mod_base = OTHER; note = 2'-deoxy-2'-fluoroadenosine-3'-phosphate
  modified_base 17: mod_base = OTHER; note = 2'-O-methyluridine-3'-phosphate
  modified_base 18: mod_base = OTHER; note = 2'-O-methyladenosine-3'-phosphate
  modified_base 19: mod_base = OTHER; note = 2'-O-methyluridine-3'-phosphate
  modified_base 20: mod_base = OTHER; note = 2'-O-methylcytidine-3'-phosphate
  modified_base 21: mod_base = OTHER; note = 2'-O-methyluridine-3'-phosphate
  modified_base 22: mod_base = OTHER; note = 2'-O-methyluridine-3'-phosphate
  modified_base 23: mod_base = OTHER; note = 2'-O-methyluridine
tgctttagcaaggcaatatcttt

SEQ ID NO: 5151 - RNA, 23 nt, synthetic construct
  source 1..23: mol_type = other RNA
  modified_base 1: mod_base = OTHER; note = 2'-O-methyluridine-3'-phosphate 5'phosphate
  modified_base 2: mod_base = OTHER; note = 2'-deoxy-2'-fluoroadenosine-3'-phosphate
  modified_base 3: mod_base = OTHER; note = 2'-O-methylguanosine-3'-phosphate
  modified_base 4: mod_base = OTHER; note = 2'-O-methylcytidine-3'-phosphate
  modified_base 5: mod_base = OTHER; note = 2'-O-methyluridine-3'-phosphate
  modified_base 6: mod_base = OTHER; note = 2'-deoxy-2'-fluorouridine-3'-phosphate
  modified_base 7: mod_base = OTHER; note = 2'-O-methyluridine-3'-phosphate
  modified_base 8: mod_base = OTHER; note = 2'-O-methyladenosine-3'-phosphate
  modified_base 9: mod_base = OTHER; note = 2'-O-methylguanosine-3'-phosphate
  modified_base 10: mod_base = OTHER; note = 2'-O-methylcytidine-3'-phosphate
  modified_base 11: mod_base = OTHER; note = 2'-O-methyladenosine-3'-phosphate
  modified_base 12: mod_base = OTHER; note = 2'-O-methyladenosine-3'-phosphate
  modified_base 13: mod_base = OTHER; note = 2'-O-methylguanosine-3'-phosphate
  modified_base 14: mod_base = OTHER; note = 2'-deoxy-2'-fluoroguanosine-3'-phosphate
  modified_base 15: mod_base = OTHER; note = 2'-O-methylcytidine-3'-phosphate
  modified_base 16: mod_base = OTHER; note = 2'-deoxy-2'-fluoroadenosine-3'-phosphate
  modified_base 17: mod_base = OTHER; note = 2'-O-methyladenosine-3'-phosphate
  modified_base 18: mod_base = OTHER; note = 2'-O-methyluridine-3'-phosphate
  modified_base 19: mod_base = OTHER; note = 2'-O-methyladenosine-3'-phosphate
  modified_base 20: mod_base = OTHER; note = 2'-O-methyluridine-3'-phosphate
  modified_base 21: mod_base = OTHER; note = 2'-O-methylcytidine-3'-phosphate
  modified_base 22: mod_base = OTHER; note = 2'-O-methyluridine-3'-phosphate
  modified_base 23: mod_base = OTHER; note = 2'-O-methyluridine
tagctttagcaaggcaatatctt

SEQ ID NO: 5152 - RNA, 23 nt, synthetic construct
  source 1..23: mol_type = other RNA
  modified_base 1: mod_base = OTHER; note = 2'-O-methyluridine-3'-phosphate 5'phosphate
  modified_base 2: mod_base = OTHER; note = 2'-deoxy-2'-fluorouridine-3'-phosphate
  modified_base 3: mod_base = OTHER; note = 2'-O-methyladenosine-3'-phosphate
  modified_base 4: mod_base = OTHER; note = 2'-O-methylguanosine-3'-phosphate
  modified_base 5: mod_base = OTHER; note = 2'-O-methylcytidine-3'-phosphate
  modified_base 6: mod_base = OTHER; note = 2'-deoxy-2'-fluorouridine-3'-phosphate
  modified_base 7: mod_base = OTHER; note = 2'-O-methyluridine-3'-phosphate
  modified_base 8: mod_base = OTHER; note = 2'-O-methyluridine-3'-phosphate
  modified_base 9: mod_base = OTHER; note = 2'-O-methyladenosine-3'-phosphate
  modified_base 10: mod_base = OTHER; note = 2'-O-methylguanosine-3'-phosphate
  modified_base 11: mod_base = OTHER; note = 2'-O-methylcytidine-3'-phosphate
  modified_base 12: mod_base = OTHER; note = 2'-O-methyladenosine-3'-phosphate
  modified_base 13: mod_base = OTHER; note = 2'-O-methyladenosine-3'-phosphate
  modified_base 14: mod_base = OTHER; note = 2'-deoxy-2'-fluoroguanosine-3'-phosphate
  modified_base 15: mod_base = OTHER; note = 2'-O-methylguanosine-3'-phosphate
  modified_base 16: mod_base = OTHER; note = 2'-deoxy-2'-fluorocytidine-3'-phosphate
  modified_base 17: mod_base = OTHER; note = 2'-O-methyladenosine-3'-phosphate
  modified_base 18: mod_base = OTHER; note = 2'-O-methyladenosine-3'-phosphate
  modified_base 19: mod_base = OTHER; note = 2'-O-methyluridine-3'-phosphate
  modified_base 20: mod_base = OTHER; note = 2'-O-methyladenosine-3'-phosphate
  modified_base 21: mod_base = OTHER; note = 2'-O-methyluridine-3'-phosphate
  modified_base 22: mod_base = OTHER; note = 2'-O-methylcytidine-3'-phosphate
  modified_base 23: mod_base = OTHER; note = 2'-O-methyluridine
ttagctttagcaaggcaatatct

SEQ ID NO: 5153 - RNA, 23 nt, synthetic construct
  source 1..23: mol_type = other RNA
  modified_base 1: mod_base = OTHER; note = 2'-O-methyluridine-3'-phosphate 5'phosphate
  modified_base 2: mod_base = OTHER; note = 2'-deoxy-2'-fluorouridine-3'-phosphate
  modified_base 3: mod_base = OTHER; note = 2'-O-methyluridine-3'-phosphate
  modified_base 4: mod_base = OTHER; note = 2'-O-methyladenosine-3'-phosphate
  modified_base 5: mod_base = OTHER; note = 2'-O-methylguanosine-3'-phosphate
  modified_base 6: mod_base = OTHER; note = 2'-deoxy-2'-fluorocytidine-3'-phosphate
  modified_base 7: mod_base = OTHER; note = 2'-O-methyluridine-3'-phosphate
  modified_base 8: mod_base = OTHER; note = 2'-O-methyluridine-3'-phosphate
  modified_base 9: mod_base = OTHER; note = 2'-O-methyluridine-3'-phosphate
  modified_base 10: mod_base = OTHER; note = 2'-O-methyladenosine-3'-phosphate
  modified_base 11: mod_base = OTHER; note = 2'-O-methylguanosine-3'-phosphate
  modified_base 12: mod_base = OTHER; note = 2'-O-methylcytidine-3'-phosphate
  modified_base 13: mod_base = OTHER; note = 2'-O-methyladenosine-3'-phosphate
  modified_base 14: mod_base = OTHER; note = 2'-deoxy-2'-fluoroadenosine-3'-phosphate
  modified_base 15: mod_base = OTHER; note = 2'-O-methylguanosine-3'-phosphate
  modified_base 16: mod_base = OTHER; note = 2'-deoxy-2'-fluoroguanosine-3'-phosphate
  modified_base 17: mod_base = OTHER; note = 2'-O-methylcytidine-3'-phosphate
  modified_base 18: mod_base = OTHER; note = 2'-O-methyladenosine-3'-phosphate
  modified_base 19: mod_base = OTHER; note = 2'-O-methyladenosine-3'-phosphate
  modified_base 20: mod_base = OTHER; note = 2'-O-methyluridine-3'-phosphate
  modified_base 21: mod_base = OTHER; note = 2'-O-methyladenosine-3'-phosphate
  modified_base 22: mod_base = OTHER; note = 2'-O-methyluridine-3'-phosphate
  modified_base 23: mod_base = OTHER; note = 2'-O-methylcytidine
tttagctttagcaaggcaatatc

SEQ ID NO: 5154 - RNA, 23 nt, synthetic construct
  source 1..23: mol_type = other RNA
  modified_base 1: mod_base = OTHER; note = 2'-O-methyluridine-3'-phosphate 5'phosphate
  modified_base 2: mod_base = OTHER; note = 2'-deoxy-2'-fluoroadenosine-3'-phosphate
  modified_base 3: mod_base = OTHER; note = 2'-O-methylcytidine-3'-phosphate
  modified_base 4: mod_base = OTHER; note = 2'-O-methyluridine-3'-phosphate
  modified_base 5: mod_base = OTHER; note = 2'-O-methylguanosine-3'-phosphate
  modified_base 6: mod_base = OTHER; note = 2'-deoxy-2'-fluorocytidine-3'-phosphate
  modified_base 7: mod_base = OTHER; note = 2'-O-methyluridine-3'-phosphate
  modified_base 8: mod_base = OTHER; note = 2'-O-methyluridine-3'-phosphate
  modified_base 9: mod_base = OTHER; note = 2'-O-methyladenosine-3'-phosphate
  modified_base 10: mod_base = OTHER; note = 2'-O-methylguanosine-3'-phosphate
  modified_base 11: mod_base = OTHER; note = 2'-O-methylcytidine-3'-phosphate
  modified_base 12: mod_base = OTHER; note = 2'-O-methyluridine-3'-phosphate
  modified_base 13: mod_base = OTHER; note = 2'-O-methyluridine-3'-phosphate
  modified_base 14: mod_base = OTHER; note = 2'-deoxy-2'-fluorouridine-3'-phosphate
  modified_base 15: mod_base = OTHER; note = 2'-O-methyladenosine-3'-phosphate
  modified_base 16: mod_base = OTHER; note = 2'-deoxy-2'-fluoroguanosine-3'-phosphate
  modified_base 17: mod_base = OTHER; note = 2'-O-methylcytidine-3'-phosphate
  modified_base 18: mod_base = OTHER; note = 2'-O-methyladenosine-3'-phosphate
  modified_base 19: mod_base = OTHER; note = 2'-O-methyladenosine-3'-phosphate
  modified_base 20: mod_base = OTHER; note = 2'-O-methylguanosine-3'-phosphate
  modified_base 21: mod_base = OTHER; note = 2'-O-methylguanosine-3'-phosphate
  modified_base 22: mod_base = OTHER; note = 2'-O-methylcytidine-3'-phosphate
  modified_base 23: mod_base = OTHER; note = 2'-O-methyladenosine
tactgcttagctttagcaaggca

SEQ ID NO: 5155 - RNA, 23 nt, synthetic construct
  source 1..23: mol_type = other RNA
  modified_base 1: mod_base = OTHER; note = 2'-O-methyluridine-3'-phosphate 5'phosphate
  modified_base 2: mod_base = OTHER; note = 2'-deoxy-2'-fluoroguanosine-3'-phosphate
  modified_base 3: mod_base = OTHER; note = 2'-O-methyladenosine-3'-phosphate
  modified_base 4: mod_base = OTHER; note = 2'-O-methylcytidine-3'-phosphate
  modified_base 5: mod_base = OTHER; note = 2'-O-methyluridine-3'-phosphate
  modified_base 6: mod_base = OTHER; note = 2'-deoxy-2'-fluoroguanosine-3'-phosphate
  modified_base 7: mod_base = OTHER; note = 2'-O-methylcytidine-3'-phosphate
  modified_base 8: mod_base = OTHER; note = 2'-O-methyluridine-3'-phosphate
  modified_base 9: mod_base = OTHER; note = 2'-O-methyluridine-3'-phosphate
  modified_base 10: mod_base = OTHER; note = 2'-O-methyladenosine-3'-phosphate
  modified_base 11: mod_base = OTHER; note = 2'-O-methylguanosine-3'-phosphate
  modified_base 12: mod_base = OTHER; note = 2'-O-methylcytidine-3'-phosphate
  modified_base 13: mod_base = OTHER; note = 2'-O-methyluridine-3'-phosphate
  modified_base 14: mod_base = OTHER; note = 2'-deoxy-2'-fluorouridine-3'-phosphate
  modified_base 15: mod_base = OTHER; note = 2'-O-methyluridine-3'-phosphate
  modified_base 16: mod_base = OTHER; note = 2'-deoxy-2'-fluoroadenosine-3'-phosphate
  modified_base 17: mod_base = OTHER; note = 2'-O-methylguanosine-3'-phosphate
  modified_base 18: mod_base = OTHER; note = 2'-O-methylcytidine-3'-phosphate
  modified_base 19: mod_base = OTHER; note = 2'-O-methyladenosine-3'-phosphate
  modified_base 20: mod_base = OTHER; note = 2'-O-methyladenosine-3'-phosphate
  modified_base 21: mod_base = OTHER; note = 2'-O-methylguanosine-3'-phosphate
  modified_base 22: mod_base = OTHER; note = 2'-O-methylguanosine-3'-phosphate
  modified_base 23: mod_base = OTHER; note = 2'-O-methylcytidine
tgactgcttagctttagcaaggc

SEQ ID NO: 5156 - RNA, 23 nt, synthetic construct
  source 1..23: mol_type = other RNA
  modified_base 1: mod_base = OTHER; note = 2'-O-methyluridine-3'-phosphate 5'phosphate
  modified_base 2: mod_base = OTHER; note = 2'-deoxy-2'-fluoroadenosine-3'-phosphate
  modified_base 3: mod_base = OTHER; note = 2'-O-methylguanosine-3'-phosphate
  modified_base 4: mod_base = OTHER; note = 2'-O-methylguanosine-3'-phosphate
  modified_base 5: mod_base = OTHER; note = 2'-O-methyladenosine-3'-phosphate
  modified_base 6: mod_base = OTHER; note = 2'-deoxy-2'-fluorocytidine-3'-phosphate
  modified_base 7: mod_base = OTHER; note = 2'-O-methyluridine-3'-phosphate
  modified_base 8: mod_base = OTHER; note = 2'-O-methylguanosine-3'-phosphate
  modified_base 9: mod_base = OTHER; note = 2'-O-methylcytidine-3'-phosphate
  modified_base 10: mod_base = OTHER; note = 2'-O-methyluridine-3'-phosphate
  modified_base 11: mod_base = OTHER; note = 2'-O-methyluridine-3'-phosphate
  modified_base 12: mod_base = OTHER; note = 2'-O-methyladenosine-3'-phosphate
  modified_base 13: mod_base = OTHER; note = 2'-O-methylguanosine-3'-phosphate
  modified_base 14: mod_base = OTHER; note = 2'-deoxy-2'-fluorocytidine-3'-phosphate
  modified_base 15: mod_base = OTHER; note = 2'-O-methyluridine-3'-phosphate
  modified_base 16: mod_base = OTHER; note = 2'-deoxy-2'-fluorouridine-3'-phosphate
  modified_base 17: mod_base = OTHER; note = 2'-O-methyluridine-3'-phosphate
  modified_base 18: mod_base = OTHER; note = 2'-O-methyladenosine-3'-phosphate
  modified_base 19: mod_base = OTHER; note = 2'-O-methylguanosine-3'-phosphate
  modified_base 20: mod_base = OTHER; note = 2'-O-methylcytidine-3'-phosphate
  modified_base 21: mod_base = OTHER; note = 2'-O-methyladenosine-3'-phosphate
  modified_base 22: mod_base = OTHER; note = 2'-O-methyladenosine-3'-phosphate
  modified_base 23: mod_base = OTHER; note = 2'-O-methylguanosine
taggactgcttagctttagcaag

SEQ ID NO: 5157 - RNA, 23 nt, synthetic construct
  source 1..23: mol_type = other RNA
  modified_base 1: mod_base = OTHER; note = 2'-O-methyluridine-3'-phosphate 5'phosphate
  modified_base 2: mod_base = OTHER; note = 2'-deoxy-2'-fluoroadenosine-3'-phosphate
  modified_base 3: mod_base = OTHER; note = 2'-O-methyluridine-3'-phosphate
  modified_base 4: mod_base = OTHER; note = 2'-O-methylguanosine-3'-phosphate
  modified_base 5: mod_base = OTHER; note = 2'-O-methyladenosine-3'-phosphate
  modified_base 6: mod_base = OTHER; note = 2'-deoxy-2'-fluorocytidine-3'-phosphate
  modified_base 7: mod_base = OTHER; note = 2'-O-methylguanosine-3'-phosphate
  modified_base 8: mod_base = OTHER; note = 2'-O-methylguanosine-3'-phosphate
  modified_base 9: mod_base = OTHER; note = 2'-O-methylcytidine-3'-phosphate
  modified_base 10: mod_base = OTHER; note = 2'-O-methyladenosine-3'-phosphate
  modified_base 11: mod_base = OTHER; note = 2'-O-methylguanosine-3'-phosphate
  modified_base 12: mod_base = OTHER; note = 2'-O-methylguanosine-3'-phosphate
  modified_base 13: mod_base = OTHER; note = 2'-O-methyladenosine-3'-phosphate
  modified_base 14: mod_base = OTHER; note = 2'-deoxy-2'-fluorocytidine-3'-phosphate
  modified_base 15: mod_base = OTHER; note = 2'-O-methyluridine-3'-phosphate
  modified_base 16: mod_base = OTHER; note = 2'-deoxy-2'-fluoroguanosine-3'-phosphate
  modified_base 17: mod_base = OTHER; note = 2'-O-methylcytidine-3'-phosphate
  modified_base 18: mod_base = OTHER; note = 2'-O-methyluridine-3'-phosphate
  modified_base 19: mod_base = OTHER; note = 2'-O-methyluridine-3'-phosphate
  modified_base 20: mod_base = OTHER; note = 2'-O-methyladenosine-3'-phosphate
  modified_base 21: mod_base = OTHER; note = 2'-O-methylguanosine-3'-phosphate
  modified_base 22: mod_base = OTHER; note = 2'-O-methylcytidine-3'-phosphate
  modified_base 23: mod_base = OTHER; note = 2'-O-methyluridine
tatgacggcaggactgcttagct

SEQ ID NO: 5158 - RNA, 23 nt, synthetic construct
  source 1..23: mol_type = other RNA
  modified_base 1: mod_base = OTHER; note = 2'-O-methyluridine-3'-phosphate 5'phosphate
  modified_base 2: mod_base = OTHER; note = 2'-deoxy-2'-fluoroguanosine-3'-phosphate
  modified_base 3: mod_base = OTHER; note = 2'-O-methyluridine-3'-phosphate
  modified_base 4: mod_base = OTHER; note = 2'-O-methylguanosine-3'-phosphate
  modified_base 5: mod_base = OTHER; note = 2'-O-methyladenosine-3'-phosphate
  modified_base 6: mod_base = OTHER; note = 2'-deoxy-2'-fluorouridine-3'-phosphate
  modified_base 7: mod_base = OTHER; note = 2'-O-methylguanosine-3'-phosphate
  modified_base 8: mod_base = OTHER; note = 2'-O-methyladenosine-3'-phosphate
  modified_base 9: mod_base = OTHER; note = 2'-O-methylcytidine-3'-phosphate
  modified_base 10: mod_base = OTHER; note = 2'-O-methylguanosine-3'-phosphate
  modified_base 11: mod_base = OTHER; note = 2'-O-methylguanosine-3'-phosphate
  modified_base 12: mod_base = OTHER; note = 2'-O-methylcytidine-3'-phosphate
  modified_base 13: mod_base = OTHER; note = 2'-O-methyladenosine-3'-phosphate
  modified_base 14: mod_base = OTHER; note = 2'-deoxy-2'-fluoroguanosine-3'-phosphate
  modified_base 15: mod_base = OTHER; note = 2'-O-methylguanosine-3'-phosphate
  modified_base 16: mod_base = OTHER; note = 2'-deoxy-2'-fluoroadenosine-3'-phosphate
  modified_base 17: mod_base = OTHER; note = 2'-O-methylcytidine-3'-phosphate
  modified_base 18: mod_base = OTHER; note = 2'-O-methyluridine-3'-phosphate
  modified_base 19: mod_base = OTHER; note = 2'-O-methylguanosine-3'-phosphate
  modified_base 20: mod_base = OTHER; note = 2'-O-methylcytidine-3'-phosphate
  modified_base 21: mod_base = OTHER; note = 2'-O-methyluridine-3'-phosphate
  modified_base 22: mod_base = OTHER; note = 2'-O-methyluridine-3'-phosphate
  modified_base 23: mod_base = OTHER; note = 2'-O-methyladenosine
tgtgatgacggcaggactgctta

SEQ ID NO: 5159 - RNA, 23 nt, synthetic construct
  source 1..23: mol_type = other RNA
  modified_base 1: mod_base = OTHER; note = 2'-O-methyluridine-3'-phosphate 5'phosphate
  modified_base 2: mod_base = OTHER; note = 2'-deoxy-2'-fluoroadenosine-3'-phosphate
  modified_base 3: mod_base = OTHER; note = 2'-O-methylguanosine-3'-phosphate
  modified_base 4: mod_base = OTHER; note = 2'-O-methyluridine-3'-phosphate
  modified_base 5: mod_base = OTHER; note = 2'-O-methylguanosine-3'-phosphate
  modified_base 6: mod_base = OTHER; note = 2'-deoxy-2'-fluoroadenosine-3'-phosphate
  modified_base 7: mod_base = OTHER; note = 2'-O-methyluridine-3'-phosphate
  modified_base 8: mod_base = OTHER; note = 2'-O-methylguanosine-3'-phosphate
  modified_base 9: mod_base = OTHER; note = 2'-O-methyladenosine-3'-phosphate
  modified_base 10: mod_base = OTHER; note = 2'-O-methylcytidine-3'-phosphate
  modified_base 11: mod_base = OTHER; note = 2'-O-methylguanosine-3'-phosphate
  modified_base 12: mod_base = OTHER; note = 2'-O-methylguanosine-3'-phosphate
  modified_base 13: mod_base = OTHER; note = 2'-O-methylcytidine-3'-phosphate
  modified_base 14: mod_base = OTHER; note = 2'-deoxy-2'-fluoroadenosine-3'-phosphate
  modified_base 15: mod_base = OTHER; note = 2'-O-methylguanosine-3'-phosphate
  modified_base 16: mod_base = OTHER; note = 2'-deoxy-2'-fluoroguanosine-3'-phosphate
  modified_base 17: mod_base = OTHER; note = 2'-O-methyladenosine-3'-phosphate
  modified_base 18: mod_base = OTHER; note = 2'-O-methylcytidine-3'-phosphate
  modified_base 19: mod_base = OTHER; note = 2'-O-methyluridine-3'-phosphate
  modified_base 20: mod_base = OTHER; note = 2'-O-methylguanosine-3'-phosphate
  modified_base 21: mod_base = OTHER; note = 2'-O-methylcytidine-3'-phosphate
  modified_base 22: mod_base = OTHER; note = 2'-O-methyluridine-3'-phosphate
  modified_base 23: mod_base = OTHER; note = 2'-O-methyluridine
tagtgatgacggcaggactgctt

SEQ ID NO: 5160 - RNA, 23 nt, synthetic construct
  source 1..23: mol_type = other RNA
  modified_base 1: mod_base = OTHER; note = 2'-O-methyluridine-3'-phosphate 5'phosphate
  modified_base 2: mod_base = OTHER; note = 2'-deoxy-2'-fluorocytidine-3'-phosphate
  modified_base 3: mod_base = OTHER; note = 2'-O-methyladenosine-3'-phosphate
  modified_base 4: mod_base = OTHER; note = 2'-O-methylguanosine-3'-phosphate
  modified_base 5: mod_base = OTHER; note = 2'-O-methyluridine-3'-phosphate
  modified_base 6: mod_base = OTHER; note = 2'-deoxy-2'-fluoroguanosine-3'-phosphate
  modified_base 7: mod_base = OTHER; note = 2'-O-methyladenosine-3'-phosphate
  modified_base 8: mod_base = OTHER; note = 2'-O-methyluridine-3'-phosphate
  modified_base 9: mod_base = OTHER; note = 2'-O-methylguanosine-3'-phosphate
  modified_base 10: mod_base = OTHER; note = 2'-O-methyladenosine-3'-phosphate
  modified_base 11: mod_base = OTHER; note = 2'-O-methylcytidine-3'-phosphate
  modified_base 12: mod_base = OTHER; note = 2'-O-methylguanosine-3'-phosphate
  modified_base 13: mod_base = OTHER; note = 2'-O-methylguanosine-3'-phosphate
  modified_base 14: mod_base = OTHER; note = 2'-deoxy-2'-fluorocytidine-3'-phosphate
  modified_base 15: mod_base = OTHER; note = 2'-O-methyladenosine-3'-phosphate
  modified_base 16: mod_base = OTHER; note = 2'-deoxy-2'-fluoroguanosine-3'-phosphate
  modified_base 17: mod_base = OTHER; note = 2'-O-methylguanosine-3'-phosphate
  modified_base 18: mod_base = OTHER; note = 2'-O-methyladenosine-3'-phosphate
  modified_base 19: mod_base = OTHER; note = 2'-O-methylcytidine-3'-phosphate
  modified_base 20: mod_base = OTHER; note = 2'-O-methyluridine-3'-phosphate
  modified_base 21: mod_base = OTHER; note = 2'-O-methylguanosine-3'-phosphate
  modified_base 22: mod_base = OTHER; note = 2'-O-methylcytidine-3'-phosphate
  modified_base 23: mod_base = OTHER; note = 2'-O-methyluridine
tcagtgatgacggcaggactgct

SEQ ID NO: 5161 - RNA, 23 nt, synthetic construct
  source 1..23: mol_type = other RNA
  modified_base 1: mod_base = OTHER; note = 2'-O-methyluridine-3'-phosphate 5'phosphate
  modified_base 2: mod_base = OTHER; note = 2'-deoxy-2'-fluoroguanosine-3'-phosphate
  modified_base 3: mod_base = OTHER; note = 2'-O-methyladenosine-3'-phosphate
  modified_base 4: mod_base = OTHER; note = 2'-O-methyluridine-3'-phosphate
  modified_base 5: mod_base = OTHER; note = 2'-O-methyluridine-3'-phosphate
  modified_base 6: mod_base = OTHER; note = 2'-deoxy-2'-fluoroadenosine-3'-phosphate
  modified_base 7: mod_base = OTHER; note = 2'-O-methylcytidine-3'-phosphate
  modified_base 8: mod_base = OTHER; note = 2'-O-methyluridine-3'-phosphate
  modified_base 9: mod_base = OTHER; note = 2'-O-methyluridine-3'-phosphate
  modified_base 10: mod_base = OTHER; note = 2'-O-methyluridine-3'-phosphate
  modified_base 11: mod_base = OTHER; note = 2'-O-methylguanosine-3'-phosphate
  modified_base 12: mod_base = OTHER; note = 2'-O-methyluridine-3'-phosphate
  modified_base 13: mod_base = OTHER; note = 2'-O-methylcytidine-3'-phosphate
  modified_base 14: mod_base = OTHER; note = 2'-deoxy-2'-fluoroadenosine-3'-phosphate
  modified_base 15: mod_base = OTHER; note = 2'-O-methylguanosine-3'-phosphate
  modified_base 16: mod_base = OTHER; note = 2'-deoxy-2'-fluorouridine-3'-phosphate
  modified_base 17: mod_base = OTHER; note = 2'-O-methylguanosine-3'-phosphate
  modified_base 18: mod_base = OTHER; note = 2'-O-methyladenosine-3'-phosphate
  modified_base 19: mod_base = OTHER; note = 2'-O-methyluridine-3'-phosphate
  modified_base 20: mod_base = OTHER; note = 2'-O-methylguanosine-3'-phosphate
  modified_base 21: mod_base = OTHER; note = 2'-O-methyladenosine-3'-phosphate
  modified_base 22: mod_base = OTHER; note = 2'-O-methylcytidine-3'-phosphate
  modified_base 23: mod_base = OTHER; note = 2'-O-methylguanosine
tgattactttgtcagtgatgacg

SEQ ID NO: 5162 - RNA, 23 nt, synthetic construct
  source 1..23: mol_type = other RNA
  modified_base 1: mod_base = OTHER; note = 2'-O-methyluridine-3'-phosphate 5'phosphate
  modified_base 2: mod_base = OTHER; note = 2'-deoxy-2'-fluoroguanosine-3'-phosphate
  modified_base 3: mod_base = OTHER; note = 2'-O-methylguanosine-3'-phosphate
  modified_base 4: mod_base = OTHER; note = 2'-O-methyladenosine-3'-phosphate
  modified_base 5: mod_base = OTHER; note = 2'-O-methyluridine-3'-phosphate
  modified_base 6: mod_base = OTHER; note = 2'-deoxy-2'-fluorouridine-3'-phosphate
  modified_base 7: mod_base = OTHER; note = 2'-O-methyladenosine-3'-phosphate
  modified_base 8: mod_base = OTHER; note = 2'-O-methylcytidine-3'-phosphate
  modified_base 9: mod_base = OTHER; note = 2'-O-methyluridine-3'-phosphate
  modified_base 10: mod_base = OTHER; note = 2'-O-methyluridine-3'-phosphate
  modified_base 11: mod_base = OTHER; note = 2'-O-methyluridine-3'-phosphate
  modified_base 12: mod_base = OTHER; note = 2'-O-methylguanosine-3'-phosphate
  modified_base 13: mod_base = OTHER; note = 2'-O-methyluridine-3'-phosphate
  modified_base 14: mod_base = OTHER; note = 2'-deoxy-2'-fluorocytidine-3'-phosphate
  modified_base 15: mod_base = OTHER; note = 2'-O-methyladenosine-3'-phosphate
  modified_base 16: mod_base = OTHER; note = 2'-deoxy-2'-fluoroguanosine-3'-phosphate
  modified_base 17: mod_base = OTHER; note = 2'-O-methyluridine-3'-phosphate
  modified_base 18: mod_base = OTHER; note = 2'-O-methylguanosine-3'-phosphate
  modified_base 19: mod_base = OTHER; note = 2'-O-methyladenosine-3'-phosphate
  modified_base 20: mod_base = OTHER; note = 2'-O-methyluridine-3'-phosphate
  modified_base 21: mod_base = OTHER; note = 2'-O-methylguanosine-3'-phosphate
  modified_base 22: mod_base = OTHER; note = 2'-O-methyladenosine-3'-phosphate
  modified_base 23: mod_base = OTHER; note = 2'-O-methylcytidine
tggattactttgtcagtgatgac

SEQ ID NO: 5163 - RNA, 23 nt, synthetic construct
  source 1..23: mol_type = other RNA
  modified_base 1: mod_base = OTHER; note = 2'-O-methyluridine-3'-phosphate 5'phosphate
  modified_base 2: mod_base = OTHER; note = 2'-deoxy-2'-fluoroguanosine-3'-phosphate
  modified_base 3: mod_base = OTHER; note = 2'-O-methylguanosine-3'-phosphate
  modified_base 4: mod_base = OTHER; note = 2'-O-methylguanosine-3'-phosphate
  modified_base 5: mod_base = OTHER; note = 2'-O-methyladenosine-3'-phosphate
  modified_base 6: mod_base = OTHER; note = 2'-deoxy-2'-fluorouridine-3'-phosphate
  modified_base 7: mod_base = OTHER; note = 2'-O-methyluridine-3'-phosphate
  modified_base 8: mod_base = OTHER; note = 2'-O-methyladenosine-3'-phosphate
  modified_base 9: mod_base = OTHER; note = 2'-O-methylcytidine-3'-phosphate
  modified_base 10: mod_base = OTHER; note = 2'-O-methyluridine-3'-phosphate
  modified_base 11: mod_base = OTHER; note = 2'-O-methyluridine-3'-phosphate
  modified_base 12: mod_base = OTHER; note = 2'-O-methyluridine-3'-phosphate
  modified_base 13: mod_base = OTHER; note = 2'-O-methylguanosine-3'-phosphate
  modified_base 14: mod_base = OTHER; note = 2'-deoxy-2'-fluorouridine-3'-phosphate
  modified_base 15: mod_base = OTHER; note = 2'-O-methylcytidine-3'-phosphate
  modified_base 16: mod_base = OTHER; note = 2'-deoxy-2'-fluoroadenosine-3'-phosphate
  modified_base 17: mod_base = OTHER; note = 2'-O-methylguanosine-3'-phosphate
  modified_base 18: mod_base = OTHER; note = 2'-O-methyluridine-3'-phosphate
  modified_base 19: mod_base = OTHER; note = 2'-O-methylguanosine-3'-phosphate
  modified_base 20: mod_base = OTHER; note = 2'-O-methyladenosine-3'-phosphate
  modified_base 21: mod_base = OTHER; note = 2'-O-methyluridine-3'-phosphate
  modified_base 22: mod_base = OTHER; note = 2'-O-methylguanosine-3'-phosphate
  modified_base 23: mod_base = OTHER; note = 2'-O-methyladenosine
tgggattactttgtcagtgatga

SEQ ID NO: 5164 - RNA, 23 nt, synthetic construct
  source 1..23: mol_type = other RNA
  modified_base 1: mod_base = OTHER; note = 2'-O-methyluridine-3'-phosphate 5'phosphate
  modified_base 2: mod_base = OTHER; note = 2'-deoxy-2'-fluorouridine-3'-phosphate
  modified_base 3: mod_base = OTHER; note = 2'-O-methylguanosine-3'-phosphate
  modified_base 4: mod_base = OTHER; note = 2'-O-methylguanosine-3'-phosphate
  modified_base 5: mod_base = OTHER; note = 2'-O-methylguanosine-3'-phosphate
  modified_base 6: mod_base = OTHER; note = 2'-deoxy-2'-fluoroadenosine-3'-phosphate
  modified_base 7: mod_base = OTHER; note = 2'-O-methyluridine-3'-phosphate
  modified_base 8: mod_base = OTHER; note = 2'-O-methyluridine-3'-phosphate
  modified_base 9: mod_base = OTHER; note = 2'-O-methyladenosine-3'-phosphate
  modified_base 10: mod_base = OTHER; note = 2'-O-methylcytidine-3'-phosphate
  modified_base 11: mod_base = OTHER; note = 2'-O-methyluridine-3'-phosphate
  modified_base 12: mod_base = OTHER; note = 2'-O-methyluridine-3'-phosphate
  modified_base 13: mod_base = OTHER; note = 2'-O-methyluridine-3'-phosphate
  modified_base 14: mod_base = OTHER; note = 2'-deoxy-2'-fluoroguanosine-3'-phosphate
  modified_base 15: mod_base = OTHER; note = 2'-O-methyluridine-3'-phosphate
  modified_base 16: mod_base = OTHER; note = 2'-deoxy-2'-fluorocytidine-3'-phosphate
  modified_base 17: mod_base = OTHER; note = 2'-O-methyladenosine-3'-phosphate
  modified_base 18: mod_base = OTHER; note = 2'-O-methylguanosine-3'-phosphate
  modified_base 19: mod_base = OTHER; note = 2'-O-methyluridine-3'-phosphate
  modified_base 20: mod_base = OTHER; note = 2'-O-methylguanosine-3'-phosphate
  modified_base 21: mod_base = OTHER; note = 2'-O-methyladenosine-3'-phosphate
  modified_base 22: mod_base = OTHER; note = 2'-O-methyluridine-3'-phosphate
  modified_base 23: mod_base = OTHER; note = 2'-O-methylguanosine
ttgggattactttgtcagtgatg

SEQ ID NO: 5165 - RNA, 23 nt, synthetic construct
  source 1..23: mol_type = other RNA
  modified_base 1: mod_base = OTHER; note = 2'-O-methyluridine-3'-phosphate 5'phosphate
  modified_base 2: mod_base = OTHER; note = 2'-deoxy-2'-fluorocytidine-3'-phosphate
  modified_base 3: mod_base = OTHER; note = 2'-O-methyluridine-3'-phosphate
  modified_base 4: mod_base = OTHER; note = 2'-O-methylguanosine-3'-phosphate
  modified_base 5: mod_base = OTHER; note = 2'-O-methylguanosine-3'-phosphate
  modified_base 6: mod_base = OTHER; note = 2'-deoxy-2'-fluoroguanosine-3'-phosphate
  modified_base 7: mod_base = OTHER; note = 2'-O-methyladenosine-3'-phosphate
  modified_base 8: mod_base = OTHER; note = 2'-O-methyluridine-3'-phosphate
  modified_base 9: mod_base = OTHER; note = 2'-O-methyluridine-3'-phosphate
  modified_base 10: mod_base = OTHER; note = 2'-O-methyladenosine-3'-phosphate
  modified_base 11: mod_base = OTHER; note = 2'-O-methylcytidine-3'-phosphate
  modified_base 12: mod_base = OTHER; note = 2'-O-methyluridine-3'-phosphate
  modified_base 13: mod_base = OTHER; note = 2'-O-methyluridine-3'-phosphate
  modified_base 14: mod_base = OTHER; note = 2'-deoxy-2'-fluorouridine-3'-phosphate
  modified_base 15: mod_base = OTHER; note = 2'-O-methylguanosine-3'-phosphate
  modified_base 16: mod_base = OTHER; note = 2'-deoxy-2'-fluorouridine-3'-phosphate
  modified_base 17: mod_base = OTHER; note = 2'-O-methylcytidine-3'-phosphate
  modified_base 18: mod_base = OTHER; note = 2'-O-methyladenosine-3'-phosphate
  modified_base 19: mod_base = OTHER; note = 2'-O-methylguanosine-3'-phosphate
  modified_base 20: mod_base = OTHER; note = 2'-O-methyluridine-3'-phosphate
  modified_base 21: mod_base = OTHER; note = 2'-O-methylguanosine-3'-phosphate
  modified_base 22: mod_base = OTHER; note = 2'-O-methyladenosine-3'-phosphate
  modified_base 23: mod_base = OTHER; note = 2'-O-methyluridine
tctgggattactttgtcagtgat

SEQ ID NO: 5166 - RNA, 23 nt, synthetic construct
  source 1..23: mol_type = other RNA
  modified_base 1: mod_base = OTHER; note = 2'-O-methyluridine-3'-phosphate 5'phosphate
  modified_base 2: mod_base = OTHER; note = 2'-deoxy-2'-fluoroguanosine-3'-phosphate
  modified_base 3: mod_base = OTHER; note = 2'-O-methylcytidine-3'-phosphate
  modified_base 4: mod_base = OTHER; note = 2'-O-methyluridine-3'-phosphate
  modified_base 5: mod_base = OTHER; note = 2'-O-methylguanosine-3'-phosphate
  modified_base 6: mod_base = OTHER; note = 2'-deoxy-2'-fluoroguanosine-3'-phosphate
  modified_base 7: mod_base = OTHER; note = 2'-O-methylguanosine-3'-phosphate
  modified_base 8: mod_base = OTHER; note = 2'-O-methyladenosine-3'-phosphate
  modified_base 9: mod_base = OTHER; note = 2'-O-methyluridine-3'-phosphate
  modified_base 10: mod_base = OTHER; note = 2'-O-methyluridine-3'-phosphate
  modified_base 11: mod_base = OTHER; note = 2'-O-methyladenosine-3'-phosphate
  modified_base 12: mod_base = OTHER; note = 2'-O-methylcytidine-3'-phosphate
  modified_base 13: mod_base = OTHER; note = 2'-O-methyluridine-3'-phosphate
  modified_base 14: mod_base = OTHER; note = 2'-deoxy-2'-fluorouridine-3'-phosphate
  modified_base 15: mod_base = OTHER; note = 2'-O-methyluridine-3'-phosphate
  modified_base 16: mod_base = OTHER; note = 2'-deoxy-2'-fluoroguanosine-3'-phosphate
  modified_base 17: mod_base = OTHER; note = 2'-O-methyluridine-3'-phosphate
  modified_base 18: mod_base = OTHER; note = 2'-O-methylcytidine-3'-phosphate
  modified_base 19: mod_base = OTHER; note = 2'-O-methyladenosine-3'-phosphate
  modified_base 20: mod_base = OTHER; note = 2'-O-methylguanosine-3'-phosphate
  modified_base 21: mod_base = OTHER; note = 2'-O-methyluridine-3'-phosphate
  modified_base 22: mod_base = OTHER; note = 2'-O-methylguanosine-3'-phosphate
  modified_base 23: mod_base = OTHER; note = 2'-O-methyladenosine
tgctgggattactttgtcagtga

SEQ ID NO: 5167 - RNA, 23 nt, synthetic construct
  source 1..23: mol_type = other RNA
  modified_base 1: mod_base = OTHER; note = 2'-O-methyluridine-3'-phosphate 5'phosphate
  modified_base 2: mod_base = OTHER; note = 2'-deoxy-2'-fluoroadenosine-3'-phosphate
  modified_base 3: mod_base = OTHER; note = 2'-O-methylguanosine-3'-phosphate
  modified_base 4: mod_base = OTHER; note = 2'-O-methylcytidine-3'-phosphate
  modified_base 5: mod_base = OTHER; note = 2'-O-methyluridine-3'-phosphate
  modified_base 6: mod_base = OTHER; note = 2'-deoxy-2'-fluoroguanosine-3'-phosphate
  modified_base 7: mod_base = OTHER; note = 2'-O-methylguanosine-3'-phosphate
  modified_base 8: mod_base = OTHER; note = 2'-O-methylguanosine-3'-phosphate
  modified_base 9: mod_base = OTHER; note = 2'-O-methyladenosine-3'-phosphate
  modified_base 10: mod_base = OTHER; note = 2'-O-methyluridine-3'-phosphate
  modified_base 11: mod_base = OTHER; note = 2'-O-methyluridine-3'-phosphate
  modified_base 12: mod_base = OTHER; note = 2'-O-methyladenosine-3'-phosphate
  modified_base 13: mod_base = OTHER; note = 2'-O-methylcytidine-3'-phosphate
  modified_base 14: mod_base = OTHER; note = 2'-deoxy-2'-fluorouridine-3'-phosphate
  modified_base 15: mod_base = OTHER; note = 2'-O-methyluridine-3'-phosphate
  modified_base 16: mod_base = OTHER; note = 2'-deoxy-2'-fluorouridine-3'-phosphate
  modified_base 17: mod_base = OTHER; note = 2'-O-methylguanosine-3'-phosphate
  modified_base 18: mod_base = OTHER; note = 2'-O-methyluridine-3'-phosphate
  modified_base 19: mod_base = OTHER; note = 2'-O-methylcytidine-3'-phosphate
  modified_base 20: mod_base = OTHER; note = 2'-O-methyladenosine-3'-phosphate
  modified_base 21: mod_base = OTHER; note = 2'-O-methylguanosine-3'-phosphate
  modified_base 22: mod_base = OTHER; note = 2'-O-methyluridine-3'-phosphate
  modified_base 23: mod_base = OTHER; note = 2'-O-methylguanosine
tagctgggattactttgtcagtg

SEQ ID NO: 5168 - RNA, 23 nt, synthetic construct
  source 1..23: mol_type = other RNA
  modified_base 1: mod_base = OTHER; note = 2'-O-methyluridine-3'-phosphate 5'phosphate
  modified_base 2: mod_base = OTHER; note = 2'-deoxy-2'-fluoroadenosine-3'-phosphate
  modified_base 3: mod_base = OTHER; note = 2'-O-methyladenosine-3'-phosphate
  modified_base 4: mod_base = OTHER; note = 2'-O-methylguanosine-3'-phosphate
  modified_base 5: mod_base = OTHER; note = 2'-O-methylcytidine-3'-phosphate
  modified_base 6: mod_base = OTHER; note = 2'-deoxy-2'-fluorouridine-3'-phosphate
  modified_base 7: mod_base = OTHER; note = 2'-O-methylguanosine-3'-phosphate
  modified_base 8: mod_base = OTHER; note = 2'-O-methylguanosine-3'-phosphate
  modified_base 9: mod_base = OTHER; note = 2'-O-methylguanosine-3'-phosphate
  modified_base 10: mod_base = OTHER; note = 2'-O-methyladenosine-3'-phosphate
  modified_base 11: mod_base = OTHER; note = 2'-O-methyluridine-3'-phosphate
  modified_base 12: mod_base = OTHER; note = 2'-O-methyluridine-3'-phosphate
  modified_base 13: mod_base = OTHER; note = 2'-O-methyladenosine-3'-phosphate
  modified_base 14: mod_base = OTHER; note = 2'-deoxy-2'-fluorocytidine-3'-phosphate
  modified_base 15: mod_base = OTHER; note = 2'-O-methyluridine-3'-phosphate
  modified_base 16: mod_base = OTHER; note = 2'-deoxy-2'-fluorouridine-3'-phosphate
  modified_base 17: mod_base = OTHER; note = 2'-O-methyluridine-3'-phosphate
  modified_base 18: mod_base = OTHER; note = 2'-O-methylguanosine-3'-phosphate
  modified_base 19: mod_base = OTHER; note = 2'-O-methyluridine-3'-phosphate
  modified_base 20: mod_base = OTHER; note = 2'-O-methylcytidine-3'-phosphate
  modified_base 21: mod_base = OTHER; note = 2'-O-methyladenosine-3'-phosphate
  modified_base 22: mod_base = OTHER; note = 2'-O-methylguanosine-3'-phosphate
  modified_base 23: mod_base = OTHER; note = 2'-O-methyluridine
taagctgggattactttgtcagt

SEQ ID NO: 5169 - RNA, 23 nt, synthetic construct
  source 1..23: mol_type = other RNA
  modified_base 1: mod_base = OTHER; note = 2'-O-methyluridine-3'-phosphate 5'phosphate
  modified_base 2: mod_base = OTHER; note = 2'-deoxy-2'-fluorocytidine-3'-phosphate
  modified_base 3: mod_base = OTHER; note = 2'-O-methyladenosine-3'-phosphate
  modified_base 4: mod_base = OTHER; note = 2'-O-methyladenosine-3'-phosphate
  modified_base 5: mod_base = OTHER; note = 2'-O-methylguanosine-3'-phosphate
  modified_base 6: mod_base = OTHER; note = 2'-deoxy-2'-fluorocytidine-3'-phosphate
  modified_base 7: mod_base = OTHER; note = 2'-O-methyluridine-3'-phosphate
  modified_base 8: mod_base = OTHER; note = 2'-O-methylguanosine-3'-phosphate
  modified_base 9: mod_base = OTHER; note = 2'-O-methylguanosine-3'-phosphate
  modified_base 10: mod_base = OTHER; note = 2'-O-methylguanosine-3'-phosphate
  modified_base 11: mod_base = OTHER; note = 2'-O-methyladenosine-3'-phosphate
  modified_base 12: mod_base = OTHER; note = 2'-O-methyluridine-3'-phosphate
  modified_base 13: mod_base = OTHER; note = 2'-O-methyluridine-3'-phosphate
  modified_base 14: mod_base = OTHER; note = 2'-deoxy-2'-fluoroadenosine-3'-phosphate
  modified_base 15: mod_base = OTHER; note = 2'-O-methylcytidine-3'-phosphate
  modified_base 16: mod_base = OTHER; note = 2'-deoxy-2'-fluorouridine-3'-phosphate
  modified_base 17: mod_base = OTHER; note = 2'-O-methyluridine-3'-phosphate
  modified_base 18: mod_base = OTHER; note = 2'-O-methyluridine-3'-phosphate
  modified_base 19: mod_base = OTHER; note = 2'-O-methylguanosine-3'-phosphate
  modified_base 20: mod_base = OTHER; note = 2'-O-methyluridine-3'-phosphate
  modified_base 21: mod_base = OTHER; note = 2'-O-methylcytidine-3'-phosphate
  modified_base 22: mod_base = OTHER; note = 2'-O-methyladenosine-3'-phosphate
  modified_base 23: mod_base = OTHER; note = 2'-O-methylguanosine
tcaagctgggattactttgtcag

SEQ ID NO: 5170 - RNA, 23 nt, synthetic construct
  source 1..23: mol_type = other RNA
  modified_base 1: mod_base = OTHER; note = 2'-O-methyluridine-3'-phosphate 5'phosphate
  modified_base 2: mod_base = OTHER; note = 2'-deoxy-2'-fluoroadenosine-3'-phosphate
  modified_base 3: mod_base = OTHER; note = 2'-O-methylcytidine-3'-phosphate
  modified_base 4: mod_base = OTHER; note = 2'-O-methyladenosine-3'-phosphate
  modified_base 5: mod_base = OTHER; note = 2'-O-methyladenosine-3'-phosphate
  modified_base 6: mod_base = OTHER; note = 2'-deoxy-2'-fluoroguanosine-3'-phosphate
  modified_base 7: mod_base = OTHER; note = 2'-O-methylcytidine-3'-phosphate
  modified_base 8: mod_base = OTHER; note = 2'-O-methyluridine-3'-phosphate
  modified_base 9: mod_base = OTHER; note = 2'-O-methylguanosine-3'-phosphate
  modified_base 10: mod_base = OTHER; note = 2'-O-methylguanosine-3'-phosphate
  modified_base 11: mod_base = OTHER; note = 2'-O-methylguanosine-3'-phosphate
  modified_base 12: mod_base = OTHER; note = 2'-O-methyladenosine-3'-phosphate
  modified_base 13: mod_base = OTHER; note = 2'-O-methyluridine-3'-phosphate
  modified_base 14: mod_base = OTHER; note = 2'-deoxy-2'-fluorouridine-3'-phosphate
  modified_base 15: mod_base = OTHER; note = 2'-O-methyladenosine-3'-phosphate
  modified_base 16: mod_base = OTHER; note = 2'-deoxy-2'-fluorocytidine-3'-phosphate
  modified_base 17: mod_base = OTHER; note = 2'-O-methyluridine-3'-phosphate
  modified_base 18: mod_base = OTHER; note = 2'-O-methyluridine-3'-phosphate
  modified_base 19: mod_base = OTHER; note = 2'-O-methyluridine-3'-phosphate
  modified_base 20: mod_base = OTHER; note = 2'-O-methylguanosine-3'-phosphate
  modified_base 21: mod_base = OTHER; note = 2'-O-methyluridine-3'-phosphate
  modified_base 22: mod_base = OTHER; note = 2'-O-methylcytidine-3'-phosphate
  modified_base 23: mod_base = OTHER; note = 2'-O-methyladenosine
tacaagctgggattactttgtca

SEQ ID NO: 5171 - RNA, 23 nt, synthetic construct
  source 1..23: mol_type = other RNA
  modified_base 1: mod_base = OTHER; note = 2'-O-methyluridine-3'-phosphate 5'phosphate
  modified_base 2: mod_base = OTHER; note = 2'-deoxy-2'-fluoroguanosine-3'-phosphate
  modified_base 3: mod_base = OTHER; note = 2'-O-methyladenosine-3'-phosphate
  modified_base 4: mod_base = OTHER; note = 2'-O-methylcytidine-3'-phosphate
  modified_base 5: mod_base = OTHER; note = 2'-O-methyladenosine-3'-phosphate
  modified_base 6: mod_base = OTHER; note = 2'-deoxy-2'-fluoroadenosine-3'-phosphate
  modified_base 7: mod_base = OTHER; note = 2'-O-methylguanosine-3'-phosphate
  modified_base 8: mod_base = OTHER; note = 2'-O-methylcytidine-3'-phosphate
  modified_base 9: mod_base = OTHER; note = 2'-O-methyluridine-3'-phosphate
  modified_base 10: mod_base = OTHER; note = 2'-O-methylguanosine-3'-phosphate
  modified_base 11: mod_base = OTHER; note = 2'-O-methylguanosine-3'-phosphate
  modified_base 12: mod_base = OTHER; note = 2'-O-methylguanosine-3'-phosphate
  modified_base 13: mod_base = OTHER; note = 2'-O-methyladenosine-3'-phosphate
  modified_base 14: mod_base = OTHER; note = 2'-deoxy-2'-fluorouridine-3'-phosphate
  modified_base 15: mod_base = OTHER; note = 2'-O-methyluridine-3'-phosphate
  modified_base 16: mod_base = OTHER; note = 2'-deoxy-2'-fluoroadenosine-3'-phosphate
  modified_base 17: mod_base = OTHER; note = 2'-O-methylcytidine-3'-phosphate
  modified_base 18: mod_base = OTHER; note = 2'-O-methyluridine-3'-phosphate
  modified_base 19: mod_base = OTHER; note = 2'-O-methyluridine-3'-phosphate
  modified_base 20: mod_base = OTHER; note = 2'-O-methyluridine-3'-phosphate
  modified_base 21: mod_base = OTHER; note = 2'-O-methylguanosine-3'-phosphate
  modified_base 22: mod_base = OTHER; note = 2'-O-methyluridine-3'-phosphate
  modified_base 23: mod_base = OTHER; note = 2'-O-methylcytidine
tgacaagctgggattactttgtc

SEQ ID NO: 5172 - RNA, 23 nt, synthetic construct
  source 1..23: mol_type = other RNA
  modified_base 1: mod_base = OTHER; note = 2'-O-methyluridine-3'-phosphate 5'phosphate
  modified_base 2: mod_base = OTHER; note = 2'-deoxy-2'-fluoroadenosine-3'-phosphate
  modified_base 3: mod_base = OTHER; note = 2'-O-methylguanosine-3'-phosphate
  modified_base 4: mod_base = OTHER; note = 2'-O-methyladenosine-3'-phosphate
  modified_base 5: mod_base = OTHER; note = 2'-O-methylcytidine-3'-phosphate
  modified_base 6: mod_base = OTHER; note = 2'-deoxy-2'-fluoroadenosine-3'-phosphate
  modified_base 7: mod_base = OTHER; note = 2'-O-methyladenosine-3'-phosphate
  modified_base 8: mod_base = OTHER; note = 2'-O-methylguanosine-3'-phosphate
  modified_base 9: mod_base = OTHER; note = 2'-O-methylcytidine-3'-phosphate
  modified_base 10: mod_base = OTHER; note = 2'-O-methyluridine-3'-phosphate
  modified_base 11: mod_base = OTHER; note = 2'-O-methylguanosine-3'-phosphate
  modified_base 12: mod_base = OTHER; note = 2'-O-methylguanosine-3'-phosphate
  modified_base 13: mod_base = OTHER; note = 2'-O-methylguanosine-3'-phosphate
  modified_base 14: mod_base = OTHER; note = 2'-deoxy-2'-fluoroadenosine-3'-phosphate
  modified_base 15: mod_base = OTHER; note = 2'-O-methyluridine-3'-phosphate
  modified_base 16: mod_base = OTHER; note = 2'-deoxy-2'-fluorouridine-3'-phosphate
  modified_base 17: mod_base = OTHER; note = 2'-O-methyladenosine-3'-phosphate
  modified_base 18: mod_base = OTHER; note = 2'-O-methylcytidine-3'-phosphate
  modified_base 19: mod_base = OTHER; note = 2'-O-methyluridine-3'-phosphate
  modified_base 20: mod_base = OTHER; note = 2'-O-methyluridine-3'-phosphate
  modified_base 21: mod_base = OTHER; note = 2'-O-methyluridine-3'-phosphate
  modified_base 22: mod_base = OTHER; note = 2'-O-methylguanosine-3'-phosphate
  modified_base 23: mod_base = OTHER; note = 2'-O-methyluridine
tagacaagctgggattactttgt

SEQ ID NO: 5173 - RNA, 23 nt, synthetic construct
  source 1..23: mol_type = other RNA
  modified_base 1: mod_base = OTHER; note = 2'-O-methyluridine-3'-phosphate 5'phosphate
  modified_base 2: mod_base = OTHER; note = 2'-deoxy-2'-fluorouridine-3'-phosphate
  modified_base 3: mod_base = OTHER; note = 2'-O-methylguanosine-3'-phosphate
  modified_base 4: mod_base = OTHER; note = 2'-O-methylguanosine-3'-phosphate
  modified_base 5: mod_base = OTHER; note = 2'-O-methylcytidine-3'-phosphate
  modified_base 6: mod_base = OTHER; note = 2'-deoxy-2'-fluoroadenosine-3'-phosphate
  modified_base 7: mod_base = OTHER; note = 2'-O-methylguanosine-3'-phosphate
  modified_base 8: mod_base = OTHER; note = 2'-O-methyladenosine-3'-phosphate
  modified_base 9: mod_base = OTHER; note = 2'-O-methylcytidine-3'-phosphate
  modified_base 10: mod_base = OTHER; note = 2'-O-methyladenosine-3'-phosphate
  modified_base 11: mod_base = OTHER; note = 2'-O-methyladenosine-3'-phosphate
  modified_base 12: mod_base = OTHER; note = 2'-O-methylguanosine-3'-phosphate
  modified_base 13: mod_base = OTHER; note = 2'-O-methylcytidine-3'-phosphate
  modified_base 14: mod_base = OTHER; note = 2'-deoxy-2'-fluorouridine-3'-phosphate
  modified_base 15: mod_base = OTHER; note = 2'-O-methylguanosine-3'-phosphate
  modified_base 16: mod_base = OTHER; note = 2'-deoxy-2'-fluoroguanosine-3'-phosphate
  modified_base 17: mod_base = OTHER; note = 2'-O-methylguanosine-3'-phosphate
  modified_base 18: mod_base = OTHER; note = 2'-O-methyladenosine-3'-phosphate
  modified_base 19: mod_base = OTHER; note = 2'-O-methyluridine-3'-phosphate
  modified_base 20: mod_base = OTHER; note = 2'-O-methyluridine-3'-phosphate
  modified_base 21: mod_base = OTHER; note = 2'-O-methyladenosine-3'-phosphate
  modified_base 22: mod_base = OTHER; note = 2'-O-methylcytidine-3'-phosphate
  modified_base 23: mod_base = OTHER; note = 2'-O-methyluridine
ttggcagacaagctgggattact

SEQ ID NO: 5174 - RNA, 23 nt, synthetic construct
  source 1..23: mol_type = other RNA
  modified_base 1: mod_base = OTHER; note = 2'-O-methyluridine-3'-phosphate 5'phosphate
  modified_base 2: mod_base = OTHER; note = 2'-deoxy-2'-fluoroguanosine-3'-phosphate
  modified_base 3: mod_base = OTHER; note = 2'-O-methyladenosine-3'-phosphate
  modified_base 4: mod_base = OTHER; note = 2'-O-methyluridine-3'-phosphate
  modified_base 5: mod_base = OTHER; note = 2'-O-methylguanosine-3'-phosphate
  modified_base 6: mod_base = OTHER; note = 2'-deoxy-2'-fluoroguanosine-3'-phosphate
  modified_base 7: mod_base = OTHER; note = 2'-O-methylcytidine-3'-phosphate
  modified_base 8: mod_base = OTHER; note = 2'-O-methyladenosine-3'-phosphate
  modified_base 9: mod_base = OTHER; note = 2'-O-methylguanosine-3'-phosphate
  modified_base 10: mod_base = OTHER; note = 2'-O-methyladenosine-3'-phosphate
  modified_base 11: mod_base = OTHER; note = 2'-O-methylcytidine-3'-phosphate
  modified_base 12: mod_base = OTHER; note = 2'-O-methyladenosine-3'-phosphate
  modified_base 13: mod_base = OTHER; note = 2'-O-methyladenosine-3'-phosphate
  modified_base 14: mod_base = OTHER; note = 2'-deoxy-2'-fluoroguanosine-3'-phosphate
  modified_base 15: mod_base = OTHER; note = 2'-O-methylcytidine-3'-phosphate
  modified_base 16: mod_base = OTHER; note = 2'-deoxy-2'-fluorouridine-3'-phosphate
  modified_base 17: mod_base = OTHER; note = 2'-O-methylguanosine-3'-phosphate
  modified_base 18: mod_base = OTHER; note = 2'-O-methylguanosine-3'-phosphate
  modified_base 19: mod_base = OTHER; note = 2'-O-methylguanosine-3'-phosphate
  modified_base 20: mod_base = OTHER; note = 2'-O-methyladenosine-3'-phosphate
  modified_base 21: mod_base = OTHER; note = 2'-O-methyluridine-3'-phosphate
  modified_base 22: mod_base = OTHER; note = 2'-O-methyluridine-3'-phosphate
  modified_base 23: mod_base = OTHER; note = 2'-O-methyladenosine
tgatggcagacaagctgggatta

SEQ ID NO: 5175 - RNA, 23 nt, synthetic construct
  source 1..23: mol_type = other RNA
  modified_base 1: mod_base = OTHER; note = 2'-O-methyluridine-3'-phosphate 5'phosphate
  modified_base 2: mod_base = OTHER; note = 2'-deoxy-2'-fluoroguanosine-3'-phosphate
  modified_base 3: mod_base = OTHER; note = 2'-O-methyladenosine-3'-phosphate
  modified_base 4: mod_base = OTHER; note = 2'-O-methyladenosine-3'-phosphate
  modified_base 5: mod_base = OTHER; note = 2'-O-methyladenosine-3'-phosphate
  modified_base 6: mod_base = OTHER; note = 2'-deoxy-2'-fluorocytidine-3'-phosphate
  modified_base 7: mod_base = OTHER; note = 2'-O-methyladenosine-3'-phosphate
  modified_base 8: mod_base = OTHER; note = 2'-O-methyluridine-3'-phosphate
  modified_base 9: mod_base = OTHER; note = 2'-O-methyluridine-3'-phosphate
  modified_base 10: mod_base = OTHER; note = 2'-O-methylcytidine-3'-phosphate
  modified_base 11: mod_base = OTHER; note = 2'-O-methylguanosine-3'-phosphate
  modified_base 12: mod_base = OTHER; note = 2'-O-methylguanosine-3'-phosphate
  modified_base 13: mod_base = OTHER; note = 2'-O-methyluridine-3'-phosphate
  modified_base 14: mod_base = OTHER; note = 2'-deoxy-2'-fluorocytidine-3'-phosphate
  modified_base 15: mod_base = OTHER; note = 2'-O-methylcytidine-3'-phosphate
  modified_base 16: mod_base = OTHER; note = 2'-deoxy-2'-fluoroguanosine-3'-phosphate
  modified_base 17: mod_base = OTHER; note = 2'-O-methylguanosine-3'-phosphate
  modified_base 18: mod_base = OTHER; note = 2'-O-methyluridine-3'-phosphate
  modified_base 19: mod_base = OTHER; note = 2'-O-methylcytidine-3'-phosphate
  modified_base 20: mod_base = OTHER; note = 2'-O-methyladenosine-3'-phosphate
  modified_base 21: mod_base = OTHER; note = 2'-O-methylguanosine-3'-phosphate
  modified_base 22: mod_base = OTHER; note = 2'-O-methylcytidine-3'-phosphate
  modified_base 23: mod_base = OTHER; note = 2'-O-methylguanosine
tgaaacattcggtccggtcagcg

SEQ ID NO: 5176 - RNA, 23 nt, synthetic construct
  source 1..23: mol_type = other RNA
  modified_base 1: mod_base = OTHER; note = 2'-O-methyluridine-3'-phosphate 5'phosphate
  modified_base 2: mod_base = OTHER; note = 2'-deoxy-2'-fluoroadenosine-3'-phosphate
  modified_base 3: mod_base = OTHER; note = 2'-O-methyluridine-3'-phosphate
  modified_base 4: mod_base = OTHER; note = 2'-O-methylguanosine-3'-phosphate
  modified_base 5: mod_base = OTHER; note = 2'-O-methyladenosine-3'-phosphate
  modified_base 6: mod_base = OTHER; note = 2'-deoxy-2'-fluoroadenosine-3'-phosphate
  modified_base 7: mod_base = OTHER; note = 2'-O-methyladenosine-3'-phosphate
  modified_base 8: mod_base = OTHER; note = 2'-O-methylcytidine-3'-phosphate
  modified_base 9: mod_base = OTHER; note = 2'-O-methyladenosine-3'-phosphate
  modified_base 10: mod_base = OTHER; note = 2'-O-methyluridine-3'-phosphate
  modified_base 11: mod_base = OTHER; note = 2'-O-methyluridine-3'-phosphate
  modified_base 12: mod_base = OTHER; note = 2'-O-methylcytidine-3'-phosphate
  modified_base 13: mod_base = OTHER; note = 2'-O-methylguanosine-3'-phosphate
  modified_base 14: mod_base = OTHER; note = 2'-deoxy-2'-fluoroguanosine-3'-phosphate
  modified_base 15: mod_base = OTHER; note = 2'-O-methyluridine-3'-phosphate
  modified_base 16: mod_base = OTHER; note = 2'-deoxy-2'-fluorocytidine-3'-phosphate
  modified_base 17: mod_base = OTHER; note = 2'-O-methylcytidine-3'-phosphate
  modified_base 18: mod_base = OTHER; note = 2'-O-methylguanosine-3'-phosphate
  modified_base 19: mod_base = OTHER; note = 2'-O-methylguanosine-3'-phosphate
  modified_base 20: mod_base = OTHER; note = 2'-O-methyluridine-3'-phosphate
  modified_base 21: mod_base = OTHER; note = 2'-O-methylcytidine-3'-phosphate
  modified_base 22: mod_base = OTHER; note = 2'-O-methyladenosine-3'-phosphate
  modified_base 23: mod_base = OTHER; note = 2'-O-methylguanosine
tatgaaacattcggtccggtcag

SEQ ID NO: 5177 - RNA, 23 nt, synthetic construct
  source 1..23: mol_type = other RNA
  modified_base 1: mod_base = OTHER; note = 2'-O-methyluridine-3'-phosphate 5'phosphate
  modified_base 2: mod_base = OTHER; note = 2'-deoxy-2'-fluoroguanosine-3'-phosphate
  modified_base 3: mod_base = OTHER; note = 2'-O-methyladenosine-3'-phosphate
  modified_base 4: mod_base = OTHER; note = 2'-O-methyluridine-3'-phosphate
  modified_base 5: mod_base = OTHER; note = 2'-O-methylguanosine-3'-phosphate
  modified_base 6: mod_base = OTHER; note = 2'-deoxy-2'-fluoroadenosine-3'-phosphate
  modified_base 7: mod_base = OTHER; note = 2'-O-methyladenosine-3'-phosphate
  modified_base 8: mod_base = OTHER; note = 2'-O-methyladenosine-3'-phosphate
  modified_base 9: mod_base = OTHER; note = 2'-O-methylcytidine-3'-phosphate
  modified_base 10: mod_base = OTHER; note = 2'-O-methyladenosine-3'-phosphate
  modified_base 11: mod_base = OTHER; note = 2'-O-methyluridine-3'-phosphate
  modified_base 12: mod_base = OTHER; note = 2'-O-methyluridine-3'-phosphate
  modified_base 13: mod_base = OTHER; note = 2'-O-methylcytidine-3'-phosphate
  modified_base 14: mod_base = OTHER; note = 2'-deoxy-2'-fluoroguanosine-3'-phosphate
  modified_base 15: mod_base = OTHER; note = 2'-O-methylguanosine-3'-phosphate
  modified_base 16: mod_base = OTHER; note = 2'-deoxy-2'-fluorouridine-3'-phosphate
  modified_base 17: mod_base = OTHER; note = 2'-O-methylcytidine-3'-phosphate
  modified_base 18: mod_base = OTHER; note = 2'-O-methylcytidine-3'-phosphate
  modified_base 19: mod_base = OTHER; note = 2'-O-methylguanosine-3'-phosphate
  modified_base 20: mod_base = OTHER; note = 2'-O-methylguanosine-3'-phosphate
  modified_base 21: mod_base = OTHER; note = 2'-O-methyluridine-3'-phosphate
  modified_base 22: mod_base = OTHER; note = 2'-O-methylcytidine-3'-phosphate
  modified_base 23: mod_base = OTHER; note = 2'-O-methyladenosine
tgatgaaacattcggtccggtca

SEQ ID NO: 5178 - RNA, 23 nt, synthetic construct
  source 1..23: mol_type = other RNA
  modified_base 1: mod_base = OTHER; note = 2'-O-methyluridine-3'-phosphate 5'phosphate
  modified_base 2: mod_base = OTHER; note = 2'-deoxy-2'-fluorouridine-3'-phosphate
  modified_base 3: mod_base = OTHER; note = 2'-O-methylguanosine-3'-phosphate
  modified_base 4: mod_base = OTHER; note = 2'-O-methyladenosine-3'-phosphate
  modified_base 5: mod_base = OTHER; note = 2'-O-methyluridine-3'-phosphate
  modified_base 6: mod_base = OTHER; note = 2'-deoxy-2'-fluoroguanosine-3'-phosphate
  modified_base 7: mod_base = OTHER; note = 2'-O-methyladenosine-3'-phosphate
  modified_base 8: mod_base = OTHER; note = 2'-O-methyladenosine-3'-phosphate
  modified_base 9: mod_base = OTHER; note = 2'-O-methyladenosine-3'-phosphate
  modified_base 10: mod_base = OTHER; note = 2'-O-methylcytidine-3'-phosphate
  modified_base 11: mod_base = OTHER; note = 2'-O-methyladenosine-3'-phosphate
  modified_base 12: mod_base = OTHER; note = 2'-O-methyluridine-3'-phosphate
  modified_base 13: mod_base = OTHER; note = 2'-O-methyluridine-3'-phosphate
  modified_base 14: mod_base = OTHER; note = 2'-deoxy-2'-fluorocytidine-3'-phosphate
  modified_base 15: mod_base = OTHER; note = 2'-O-methylguanosine-3'-phosphate
  modified_base 16: mod_base = OTHER; note = 2'-deoxy-2'-fluoroguanosine-3'-phosphate
  modified_base 17: mod_base = OTHER; note = 2'-O-methyluridine-3'-phosphate
  modified_base 18: mod_base = OTHER; note = 2'-O-methylcytidine-3'-phosphate
  modified_base 19: mod_base = OTHER; note = 2'-O-methylcytidine-3'-phosphate
  modified_base 20: mod_base = OTHER; note = 2'-O-methylguanosine-3'-phosphate
  modified_base 21: mod_base = OTHER; note = 2'-O-methylguanosine-3'-phosphate
  modified_base 22: mod_base = OTHER; note = 2'-O-methyluridine-3'-phosphate
  modified_base 23: mod_base = OTHER; note = 2'-O-methylcytidine
ttgatgaaacattcggtccggtc

SEQ ID NO: 5179 - RNA, 23 nt, synthetic construct
  source 1..23: mol_type = other RNA
  modified_base 1: mod_base = OTHER; note = 2'-O-methyluridine-3'-phosphate 5'phosphate
  modified_base 2: mod_base = OTHER; note = 2'-deoxy-2'-fluoroguanosine-3'-phosphate
  modified_base 3: mod_base = OTHER; note = 2'-O-methyluridine-3'-phosphate
  modified_base 4: mod_base = OTHER; note = 2'-O-methylguanosine-3'-phosphate
  modified_base 5: mod_base = OTHER; note = 2'-O-methyladenosine-3'-phosphate
  modified_base 6: mod_base = OTHER; note = 2'-deoxy-2'-fluorouridine-3'-phosphate
  modified_base 7: mod_base = OTHER; note = 2'-O-methylguanosine-3'-phosphate
  modified_base 8: mod_base = OTHER; note = 2'-O-methyladenosine-3'-phosphate
  modified_base 9: mod_base = OTHER; note = 2'-O-methyladenosine-3'-phosphate
  modified_base 10: mod_base = OTHER; note = 2'-O-methyladenosine-3'-phosphate
  modified_base 11: mod_base = OTHER; note = 2'-O-methylcytidine-3'-phosphate
  modified_base 12: mod_base = OTHER; note = 2'-O-methyladenosine-3'-phosphate
  modified_base 13: mod_base = OTHER; note = 2'-O-methyluridine-3'-phosphate
  modified_base 14: mod_base = OTHER; note = 2'-deoxy-2'-fluorouridine-3'-phosphate
  modified_base 15: mod_base = OTHER; note = 2'-O-methylcytidine-3'-phosphate
  modified_base 16: mod_base = OTHER; note = 2'-deoxy-2'-fluoroguanosine-3'-phosphate
  modified_base 17: mod_base = OTHER; note = 2'-O-methylguanosine-3'-phosphate
  modified_base 18: mod_base = OTHER; note = 2'-O-methyluridine-3'-phosphate
  modified_base 19: mod_base = OTHER; note = 2'-O-methylcytidine-3'-phosphate
  modified_base 20: mod_base = OTHER; note = 2'-O-methylcytidine-3'-phosphate
  modified_base 21: mod_base = OTHER; note = 2'-O-methylguanosine-3'-phosphate
  modified_base 22: mod_base = OTHER; note = 2'-O-methylguanosine-3'-phosphate
  modified_base 23: mod_base = OTHER; note = 2'-O-methyluridine
tgtgatgaaacattcggtccggt

SEQ ID NO: 5180 - RNA, 23 nt, synthetic construct
  source 1..23: mol_type = other RNA
  modified_base 1: mod_base = OTHER; note = 2'-O-methyluridine-3'-phosphate 5'phosphate
  modified_base 2: mod_base = OTHER; note = 2'-deoxy-2'-fluoroadenosine-3'-phosphate
  modified_base 3: mod_base = OTHER; note = 2'-O-methylguanosine-3'-phosphate
  modified_base 4: mod_base = OTHER; note = 2'-O-methyluridine-3'-phosphate
  modified_base 5: mod_base = OTHER; note = 2'-O-methylguanosine-3'-phosphate
  modified_base 6: mod_base = OTHER; note = 2'-deoxy-2'-fluoroadenosine-3'-phosphate
  modified_base 7: mod_base = OTHER; note = 2'-O-methyluridine-3'-phosphate
  modified_base 8: mod_base = OTHER; note = 2'-O-methylguanosine-3'-phosphate
  modified_base 9: mod_base = OTHER; note = 2'-O-methyladenosine-3'-phosphate
  modified_base 10: mod_base = OTHER; note = 2'-O-methyladenosine-3'-phosphate
  modified_base 11: mod_base = OTHER; note = 2'-O-methyladenosine-3'-phosphate
  modified_base 12: mod_base = OTHER; note = 2'-O-methylcytidine-3'-phosphate
  modified_base 13: mod_base = OTHER; note = 2'-O-methyladenosine-3'-phosphate
  modified_base 14: mod_base = OTHER; note = 2'-deoxy-2'-fluorouridine-3'-phosphate
  modified_base 15: mod_base = OTHER; note = 2'-O-methyluridine-3'-phosphate
  modified_base 16: mod_base = OTHER; note = 2'-deoxy-2'-fluorocytidine-3'-phosphate
  modified_base 17: mod_base = OTHER; note = 2'-O-methylguanosine-3'-phosphate
  modified_base 18: mod_base = OTHER; note = 2'-O-methylguanosine-3'-phosphate
  modified_base 19: mod_base = OTHER; note = 2'-O-methyluridine-3'-phosphate
  modified_base 20: mod_base = OTHER; note = 2'-O-methylcytidine-3'-phosphate
  modified_base 21: mod_base = OTHER; note = 2'-O-methylcytidine-3'-phosphate
  modified_base 22: mod_base = OTHER; note = 2'-O-methylguanosine-3'-phosphate
  modified_base 23: mod_base = OTHER; note = 2'-O-methylguanosine
tagtgatgaaacattcggtccgg

SEQ ID NO: 5181 - RNA, 23 nt, synthetic construct
  source 1..23: mol_type = other RNA
  modified_base 1: mod_base = OTHER; note = 2'-O-methyluridine-3'-phosphate 5'phosphate
  modified_base 2: mod_base = OTHER; note = 2'-deoxy-2'-fluorocytidine-3'-phosphate
  modified_base 3: mod_base = OTHER; note = 2'-O-methyladenosine-3'-phosphate
  modified_base 4: mod_base = OTHER; note = 2'-O-methylguanosine-3'-phosphate
  modified_base 5: mod_base = OTHER; note = 2'-O-methyluridine-3'-phosphate
  modified_base 6: mod_base = OTHER; note = 2'-deoxy-2'-fluoroguanosine-3'-phosphate
  modified_base 7: mod_base = OTHER; note = 2'-O-methyladenosine-3'-phosphate
  modified_base 8: mod_base = OTHER; note = 2'-O-methyluridine-3'-phosphate
  modified_base 9: mod_base = OTHER; note = 2'-O-methylguanosine-3'-phosphate
  modified_base 10: mod_base = OTHER; note = 2'-O-methyladenosine-3'-phosphate
  modified_base 11: mod_base = OTHER; note = 2'-O-methyladenosine-3'-phosphate
  modified_base 12: mod_base = OTHER; note = 2'-O-methyladenosine-3'-phosphate
  modified_base 13: mod_base = OTHER; note = 2'-O-methylcytidine-3'-phosphate
  modified_base 14: mod_base = OTHER; note = 2'-deoxy-2'-fluoroadenosine-3'-phosphate
  modified_base 15: mod_base = OTHER; note = 2'-O-methyluridine-3'-phosphate
  modified_base 16: mod_base = OTHER; note = 2'-deoxy-2'-fluorouridine-3'-phosphate
  modified_base 17: mod_base = OTHER; note = 2'-O-methylcytidine-3'-phosphate
  modified_base 18: mod_base = OTHER; note = 2'-O-methylguanosine-3'-phosphate
  modified_base 19: mod_base = OTHER; note = 2'-O-methylguanosine-3'-phosphate
  modified_base 20: mod_base = OTHER; note = 2'-O-methyluridine-3'-phosphate
  modified_base 21: mod_base = OTHER; note = 2'-O-methylcytidine-3'-phosphate
  modified_base 22: mod_base = OTHER; note = 2'-O-methylcytidine-3'-phosphate
  modified_base 23: mod_base = OTHER; note = 2'-O-methylguanosine
tcagtgatgaaacattcggtccg

SEQ ID NO: 5182 - RNA, 23 nt, synthetic construct
  source 1..23: mol_type = other RNA
  modified_base 1: mod_base = OTHER; note = 2'-O-methyluridine-3'-phosphate 5'phosphate
  modified_base 2: mod_base = OTHER; note = 2'-deoxy-2'-fluoroadenosine-3'-phosphate
  modified_base 3: mod_base = OTHER; note = 2'-O-methylguanosine-3'-phosphate
  modified_base 4: mod_base = OTHER; note = 2'-O-methylcytidine-3'-phosphate
  modified_base 5: mod_base = OTHER; note = 2'-O-methylcytidine-3'-phosphate
  modified_base 6: mod_base = OTHER; note = 2'-deoxy-2'-fluoroadenosine-3'-phosphate
  modified_base 7: mod_base = OTHER; note = 2'-O-methylguanosine-3'-phosphate
  modified_base 8: mod_base = OTHER; note = 2'-O-methyluridine-3'-phosphate
  modified_base 9: mod_base = OTHER; note = 2'-O-methylguanosine-3'-phosphate
  modified_base 10: mod_base = OTHER; note = 2'-O-methyladenosine-3'-phosphate
  modified_base 11: mod_base = OTHER; note = 2'-O-methyluridine-3'-phosphate
  modified_base 12: mod_base = OTHER; note = 2'-O-methylguanosine-3'-phosphate
  modified_base 13: mod_base = OTHER; note = 2'-O-methyladenosine-3'-phosphate
  modified_base 14: mod_base = OTHER; note = 2'-deoxy-2'-fluoroadenosine-3'-phosphate
  modified_base 15: mod_base = OTHER; note = 2'-O-methyladenosine-3'-phosphate
  modified_base 16: mod_base = OTHER; note = 2'-deoxy-2'-fluorocytidine-3'-phosphate
  modified_base 17: mod_base = OTHER; note = 2'-O-methyladenosine-3'-phosphate
  modified_base 18: mod_base = OTHER; note = 2'-O-methyluridine-3'-phosphate
  modified_base 19: mod_base = OTHER; note = 2'-O-methyluridine-3'-phosphate
  modified_base 20: mod_base = OTHER; note = 2'-O-methylcytidine-3'-phosphate
  modified_base 21: mod_base = OTHER; note = 2'-O-methylguanosine-3'-phosphate
  modified_base 22: mod_base = OTHER; note = 2'-O-methylguanosine-3'-phosphate
  modified_base 23: mod_base = OTHER; note = 2'-O-methyluridine
tagccagtgatgaaacattcggt

SEQ ID NO: 5183 - RNA, 23 nt, synthetic construct
  source 1..23: mol_type = other RNA
  modified_base 1: mod_base = OTHER; note = 2'-O-methyluridine-3'-phosphate 5'phosphate
  modified_base 2: mod_base = OTHER; note = 2'-deoxy-2'-fluoroadenosine-3'-phosphate
  modified_base 3: mod_base = OTHER; note = 2'-O-methyladenosine-3'-phosphate
  modified_base 4: mod_base = OTHER; note = 2'-O-methyladenosine-3'-phosphate
  modified_base 5: mod_base = OTHER; note = 2'-O-methyladenosine-3'-phosphate
  modified_base 6: mod_base = OTHER; note = 2'-deoxy-2'-fluoroguanosine-3'-phosphate
  modified_base 7: mod_base = OTHER; note = 2'-O-methyluridine-3'-phosphate
  modified_base 8: mod_base = OTHER; note = 2'-O-methyladenosine-3'-phosphate
  modified_base 9: mod_base = OTHER; note = 2'-O-methylcytidine-3'-phosphate
  modified_base 10: mod_base = OTHER; note = 2'-O-methylcytidine-3'-phosphate
  modified_base 11: mod_base = OTHER; note = 2'-O-methyluridine-3'-phosphate
  modified_base 12: mod_base = OTHER; note = 2'-O-methyluridine-3'-phosphate
  modified_base 13: mod_base = OTHER; note = 2'-O-methylguanosine-3'-phosphate
  modified_base 14: mod_base = OTHER; note = 2'-deoxy-2'-fluoroguanosine-3'-phosphate
  modified_base 15: mod_base = OTHER; note = 2'-O-methylguanosine-3'-phosphate
  modified_base 16: mod_base = OTHER; note = 2'-deoxy-2'-fluorouridine-3'-phosphate
  modified_base 17: mod_base = OTHER; note = 2'-O-methyluridine-3'-phosphate
  modified_base 18: mod_base = OTHER; note = 2'-O-methyluridine-3'-phosphate
  modified_base 19: mod_base = OTHER; note = 2'-O-methylcytidine-3'-phosphate
  modified_base 20: mod_base = OTHER; note = 2'-O-methyluridine-3'-phosphate
  modified_base 21: mod_base = OTHER; note = 2'-O-methylcytidine-3'-phosphate
  modified_base 22: mod_base = OTHER; note = 2'-O-methylcytidine-3'-phosphate
  modified_base 23: mod_base = OTHER; note = 2'-O-methylcytidine
taaaagtaccttgggtttctccc

SEQ ID NO: 5184 - RNA, 23 nt, synthetic construct
  source 1..23: mol_type = other RNA
  modified_base 1: mod_base = OTHER; note = 2'-O-methyluridine-3'-phosphate 5'phosphate
  modified_base 2: mod_base = OTHER; note = 2'-deoxy-2'-fluorocytidine-3'-phosphate
  modified_base 3: mod_base = OTHER; note = 2'-O-methyladenosine-3'-phosphate
  modified_base 4: mod_base = OTHER; note = 2'-O-methyladenosine-3'-phosphate
  modified_base 5: mod_base = OTHER; note = 2'-O-methyladenosine-3'-phosphate
  modified_base 6: mod_base = OTHER; note = 2'-deoxy-2'-fluoroadenosine-3'-phosphate
  modified_base 7: mod_base = OTHER; note = 2'-O-methylguanosine-3'-phosphate
  modified_base 8: mod_base = OTHER; note = 2'-O-methyluridine-3'-phosphate
  modified_base 9: mod_base = OTHER; note = 2'-O-methyladenosine-3'-phosphate
  modified_base 10: mod_base = OTHER; note = 2'-O-methylcytidine-3'-phosphate
  modified_base 11: mod_base = OTHER; note = 2'-O-methylcytidine-3'-phosphate
  modified_base 12: mod_base = OTHER; note = 2'-O-methyluridine-3'-phosphate
  modified_base 13: mod_base = OTHER; note = 2'-O-methyluridine-3'-phosphate
  modified_base 14: mod_base = OTHER; note = 2'-deoxy-2'-fluoroguanosine-3'-phosphate
  modified_base 15: mod_base = OTHER; note = 2'-O-methylguanosine-3'-phosphate
  modified_base 16: mod_base = OTHER; note = 2'-deoxy-2'-fluoroguanosine-3'-phosphate
  modified_base 17: mod_base = OTHER; note = 2'-O-methyluridine-3'-phosphate
  modified_base 18: mod_base = OTHER; note = 2'-O-methyluridine-3'-phosphate
  modified_base 19: mod_base = OTHER; note = 2'-O-methyluridine-3'-phosphate
  modified_base 20: mod_base = OTHER; note = 2'-O-methylcytidine-3'-phosphate
  modified_base 21: mod_base = OTHER; note = 2'-O-methyluridine-3'-phosphate
  modified_base 22: mod_base = OTHER; note = 2'-O-methylcytidine-3'-phosphate
  modified_base 23: mod_base = OTHER; note = 2'-O-methylcytidine
tcaaaagtaccttgggtttctcc

SEQ ID NO: 5185 - RNA, 23 nt, synthetic construct
  source 1..23: mol_type = other RNA
  modified_base 1: mod_base = OTHER; note = 2'-O-methyluridine-3'-phosphate 5'phosphate
  modified_base 2: mod_base = OTHER; note = 2'-deoxy-2'-fluorocytidine-3'-phosphate
  modified_base 3: mod_base = OTHER; note = 2'-O-methylcytidine-3'-phosphate
  modified_base 4: mod_base = OTHER; note = 2'-O-methyladenosine-3'-phosphate
  modified_base 5: mod_base = OTHER; note = 2'-O-methyladenosine-3'-phosphate
  modified_base 6: mod_base = OTHER; note = 2'-deoxy-2'-fluoroadenosine-3'-phosphate
  modified_base 7: mod_base = OTHER; note = 2'-O-methyladenosine-3'-phosphate
  modified_base 8: mod_base = OTHER; note = 2'-O-methylguanosine-3'-phosphate
  modified_base 9: mod_base = OTHER; note = 2'-O-methyluridine-3'-phosphate
  modified_base 10: mod_base = OTHER; note = 2'-O-methyladenosine-3'-phosphate
  modified_base 11: mod_base = OTHER; note = 2'-O-methylcytidine-3'-phosphate
  modified_base 12: mod_base = OTHER; note = 2'-O-methylcytidine-3'-phosphate
  modified_base 13: mod_base = OTHER; note = 2'-O-methyluridine-3'-phosphate
  modified_base 14: mod_base = OTHER; note = 2'-deoxy-2'-fluorouridine-3'-phosphate
  modified_base 15: mod_base = OTHER; note = 2'-O-methylguanosine-3'-phosphate
  modified_base 16: mod_base = OTHER; note = 2'-deoxy-2'-fluoroguanosine-3'-phosphate
  modified_base 17: mod_base = OTHER; note = 2'-O-methylguanosine-3'-phosphate
  modified_base 18: mod_base = OTHER; note = 2'-O-methyluridine-3'-phosphate
  modified_base 19: mod_base = OTHER; note = 2'-O-methyluridine-3'-phosphate
  modified_base 20: mod_base = OTHER; note = 2'-O-methyluridine-3'-phosphate
  modified_base 21: mod_base = OTHER; note = 2'-O-methylcytidine-3'-phosphate
  modified_base 22: mod_base = OTHER; note = 2'-O-methyluridine-3'-phosphate
  modified_base 23: mod_base = OTHER; note = 2'-O-methylcytidine
tccaaaagtaccttgggtttctc

SEQ ID NO: 5186 - RNA, 23 nt, synthetic construct
  source 1..23: mol_type = other RNA
  modified_base 1: mod_base = OTHER; note = 2'-O-methyluridine-3'-phosphate 5'phosphate
  modified_base 2: mod_base = OTHER; note = 2'-deoxy-2'-fluorouridine-3'-phosphate
  modified_base 3: mod_base = OTHER; note = 2'-O-methylcytidine-3'-phosphate
  modified_base 4: mod_base = OTHER; note = 2'-O-methylcytidine-3'-phosphate
  modified_base 5: mod_base = OTHER; note = 2'-O-methyladenosine-3'-phosphate
  modified_base 6: mod_base = OTHER; note = 2'-deoxy-2'-fluoroadenosine-3'-phosphate
  modified_base 7: mod_base = OTHER; note = 2'-O-methyladenosine-3'-phosphate
  modified_base 8: mod_base = OTHER; note = 2'-O-methyladenosine-3'-phosphate
  modified_base 9: mod_base = OTHER; note = 2'-O-methylguanosine-3'-phosphate
  modified_base 10: mod_base = OTHER; note = 2'-O-methyluridine-3'-phosphate
  modified_base 11: mod_base = OTHER; note = 2'-O-methyladenosine-3'-phosphate
  modified_base 12: mod_base = OTHER; note = 2'-O-methylcytidine-3'-phosphate
  modified_base 13: mod_base = OTHER; note = 2'-O-methylcytidine-3'-phosphate
  modified_base 14: mod_base = OTHER; note = 2'-deoxy-2'-fluorouridine-3'-phosphate
  modified_base 15: mod_base = OTHER; note = 2'-O-methyluridine-3'-phosphate
  modified_base 16: mod_base = OTHER; note = 2'-deoxy-2'-fluoroguanosine-3'-phosphate
  modified_base 17: mod_base = OTHER; note = 2'-O-methylguanosine-3'-phosphate
  modified_base 18: mod_base = OTHER; note = 2'-O-methylguanosine-3'-phosphate
  modified_base 19: mod_base = OTHER; note = 2'-O-methyluridine-3'-phosphate
  modified_base 20: mod_base = OTHER; note = 2'-O-methyluridine-3'-phosphate
  modified_base 21: mod_base = OTHER; note = 2'-O-methyluridine-3'-phosphate
  modified_base 22: mod_base = OTHER; note = 2'-O-methylcytidine-3'-phosphate
  modified_base 23: mod_base = OTHER; note = 2'-O-methyluridine
ttccaaaagtaccttgggtttct

SEQ ID NO: 5187 - RNA, 23 nt, synthetic construct
  source 1..23: mol_type = other RNA
  modified_base 1: mod_base = OTHER; note = 2'-O-methyluridine-3'-phosphate 5'phosphate
  modified_base 2: mod_base = OTHER; note = 2'-deoxy-2'-fluorocytidine-3'-phosphate
  modified_base 3: mod_base = OTHER; note = 2'-O-methyluridine-3'-phosphate
  modified_base 4: mod_base = OTHER; note = 2'-O-methylcytidine-3'-phosphate
  modified_base 5: mod_base = OTHER; note = 2'-O-methylcytidine-3'-phosphate
  modified_base 6: mod_base = OTHER; note = 2'-deoxy-2'-fluoroadenosine-3'-phosphate
  modified_base 7: mod_base = OTHER; note = 2'-O-methyladenosine-3'-phosphate
  modified_base 8: mod_base = OTHER; note = 2'-O-methyladenosine-3'-phosphate
  modified_base 9: mod_base = OTHER; note = 2'-O-methyladenosine-3'-phosphate
  modified_base 10: mod_base = OTHER; note = 2'-O-methylguanosine-3'-phosphate
  modified_base 11: mod_base = OTHER; note = 2'-O-methyluridine-3'-phosphate
  modified_base 12: mod_base = OTHER; note = 2'-O-methyladenosine-3'-phosphate
  modified_base 13: mod_base = OTHER; note = 2'-O-methylcytidine-3'-phosphate
  modified_base 14: mod_base = OTHER; note = 2'-deoxy-2'-fluorocytidine-3'-phosphate
  modified_base 15: mod_base = OTHER; note = 2'-O-methyluridine-3'-phosphate
  modified_base 16: mod_base = OTHER; note = 2'-deoxy-2'-fluorouridine-3'-phosphate
  modified_base 17: mod_base = OTHER; note = 2'-O-methylguanosine-3'-phosphate
  modified_base 18: mod_base = OTHER; note = 2'-O-methylguanosine-3'-phosphate
  modified_base 19: mod_base = OTHER; note = 2'-O-methylguanosine-3'-phosphate
  modified_base 20: mod_base = OTHER; note = 2'-O-methyluridine-3'-phosphate
  modified_base 21: mod_base = OTHER; note = 2'-O-methyluridine-3'-phosphate
  modified_base 22: mod_base = OTHER; note = 2'-O-methyluridine-3'-phosphate
  modified_base 23: mod_base = OTHER; note = 2'-O-methylcytidine
tctccaaaagtaccttgggtttc

SEQ ID NO: 5188 - RNA, 23 nt, synthetic construct
  source 1..23: mol_type = other RNA
  modified_base 1: mod_base = OTHER; note = 2'-O-methyluridine-3'-phosphate 5'phosphate
  modified_base 2: mod_base = OTHER; note = 2'-deoxy-2'-fluoroguanosine-3'-phosphate
  modified_base 3: mod_base = OTHER; note = 2'-O-methylcytidine-3'-phosphate
  modified_base 4: mod_base = OTHER; note = 2'-O-methyluridine-3'-phosphate
  modified_base 5: mod_base = OTHER; note = 2'-O-methylcytidine-3'-phosphate
  modified_base 6: mod_base = OTHER; note = 2'-deoxy-2'-fluorocytidine-3'-phosphate
  modified_base 7: mod_base = OTHER; note = 2'-O-methyladenosine-3'-phosphate
  modified_base 8: mod_base = OTHER; note = 2'-O-methyladenosine-3'-phosphate
  modified_base 9: mod_base = OTHER; note = 2'-O-methyladenosine-3'-phosphate
  modified_base 10: mod_base = OTHER; note = 2'-O-methyladenosine-3'-phosphate
  modified_base 11: mod_base = OTHER; note = 2'-O-methylguanosine-3'-phosphate
  modified_base 12: mod_base = OTHER; note = 2'-O-methyluridine-3'-phosphate
  modified_base 13: mod_base = OTHER; note = 2'-O-methyladenosine-3'-phosphate
  modified_base 14: mod_base = OTHER; note = 2'-deoxy-2'-fluorocytidine-3'-phosphate
  modified_base 15: mod_base = OTHER; note = 2'-O-methylcytidine-3'-phosphate
  modified_base 16: mod_base = OTHER; note = 2'-deoxy-2'-fluorouridine-3'-phosphate
  modified_base 17: mod_base = OTHER; note = 2'-O-methyluridine-3'-phosphate
  modified_base 18: mod_base = OTHER; note = 2'-O-methylguanosine-3'-phosphate
  modified_base 19: mod_base = OTHER; note = 2'-O-methylguanosine-3'-phosphate
  modified_base 20: mod_base = OTHER; note = 2'-O-methylguanosine-3'-phosphate
  modified_base 21: mod_base = OTHER; note = 2'-O-methyluridine-3'-phosphate
  modified_base 22: mod_base = OTHER; note = 2'-O-methyluridine-3'-phosphate
  modified_base 23: mod_base = OTHER; note = 2'-O-methyluridine
tgctccaaaagtaccttgggttt

SEQ ID NO: 5189 - RNA, 23 nt, synthetic construct
  source 1..23: mol_type = other RNA
  modified_base 1: mod_base = OTHER; note = 2'-O-methyluridine-3'-phosphate 5'phosphate
  modified_base 2: mod_base = OTHER; note = 2'-deoxy-2'-fluoroadenosine-3'-phosphate
  modified_base 3: mod_base = OTHER; note = 2'-O-methylguanosine-3'-phosphate
  modified_base 4: mod_base = OTHER; note = 2'-O-methylcytidine-3'-phosphate
  modified_base 5: mod_base = OTHER; note = 2'-O-methyluridine-3'-phosphate
  modified_base 6: mod_base = OTHER; note = 2'-deoxy-2'-fluorocytidine-3'-phosphate
  modified_base 7: mod_base = OTHER; note = 2'-O-methylcytidine-3'-phosphate
  modified_base 8: mod_base = OTHER; note = 2'-O-methyladenosine-3'-phosphate
  modified_base 9: mod_base = OTHER; note = 2'-O-methyladenosine-3'-phosphate
  modified_base 10: mod_base = OTHER; note = 2'-O-methyladenosine-3'-phosphate
  modified_base 11: mod_base = OTHER; note = 2'-O-methyladenosine-3'-phosphate
  modified_base 12: mod_base = OTHER; note = 2'-O-methylguanosine-3'-phosphate
  modified_base 13: mod_base = OTHER; note = 2'-O-methyluridine-3'-phosphate
  modified_base 14: mod_base = OTHER; note = 2'-deoxy-2'-fluoroadenosine-3'-phosphate
  modified_base 15: mod_base = OTHER; note = 2'-O-methylcytidine-3'-phosphate
  modified_base 16: mod_base = OTHER; note = 2'-deoxy-2'-fluorocytidine-3'-phosphate
  modified_base 17: mod_base = OTHER; note = 2'-O-methyluridine-3'-phosphate
  modified_base 18: mod_base = OTHER; note = 2'-O-methyluridine-3'-phosphate
  modified_base 19: mod_base = OTHER; note = 2'-O-methylguanosine-3'-phosphate
  modified_base 20: mod_base = OTHER; note = 2'-O-methylguanosine-3'-phosphate
  modified_base 21: mod_base = OTHER; note = 2'-O-methylguanosine-3'-phosphate
  modified_base 22: mod_base = OTHER; note = 2'-O-methyluridine-3'-phosphate
  modified_base 23: mod_base = OTHER; note = 2'-O-methyluridine
tagctccaaaagtaccttgggtt

SEQ ID NO: 5190 - RNA, 23 nt, synthetic construct
  source 1..23: mol_type = other RNA
  modified_base 1: mod_base = OTHER; note = 2'-O-methyluridine-3'-phosphate 5'phosphate
  modified_base 2: mod_base = OTHER; note = 2'-deoxy-2'-fluorocytidine-3'-phosphate
  modified_base 3: mod_base = OTHER; note = 2'-O-methylcytidine-3'-phosphate
  modified_base 4: mod_base = OTHER; note = 2'-O-methyladenosine-3'-phosphate
  modified_base 5: mod_base = OTHER; note = 2'-O-methylguanosine-3'-phosphate
  modified_base 6: mod_base = OTHER; note = 2'-deoxy-2'-fluorocytidine-3'-phosphate
  modified_base 7: mod_base = OTHER; note = 2'-O-methyluridine-3'-phosphate
  modified_base 8: mod_base = OTHER; note = 2'-O-methylcytidine-3'-phosphate
  modified_base 9: mod_base = OTHER; note = 2'-O-methylcytidine-3'-phosphate
  modified_base 10: mod_base = OTHER; note = 2'-O-methyladenosine-3'-phosphate
  modified_base 11: mod_base = OTHER; note = 2'-O-methyladenosine-3'-phosphate
  modified_base 12: mod_base = OTHER; note = 2'-O-methyladenosine-3'-phosphate
  modified_base 13: mod_base = OTHER; note = 2'-O-methyladenosine-3'-phosphate
  modified_base 14: mod_base = OTHER; note = 2'-deoxy-2'-fluoroguanosine-3'-phosphate
  modified_base 15: mod_base = OTHER; note = 2'-O-methyluridine-3'-phosphate
  modified_base 16: mod_base = OTHER; note = 2'-deoxy-2'-fluoroadenosine-3'-phosphate
  modified_base 17: mod_base = OTHER; note = 2'-O-methylcytidine-3'-phosphate
  modified_base 18: mod_base = OTHER; note = 2'-O-methylcytidine-3'-phosphate
  modified_base 19: mod_base = OTHER; note = 2'-O-methyluridine-3'-phosphate
  modified_base 20: mod_base = OTHER; note = 2'-O-methyluridine-3'-phosphate
  modified_base 21: mod_base = OTHER; note = 2'-O-methylguanosine-3'-phosphate
  modified_base 22: mod_base = OTHER; note = 2'-O-methylguanosine-3'-phosphate
  modified_base 23: mod_base = OTHER; note = 2'-O-methylguanosine
tccagctccaaaagtaccttggg

SEQ ID NO: 5191 - RNA, 23 nt, synthetic construct
  source 1..23: mol_type = other RNA
  modified_base 1: mod_base = OTHER; note = 2'-O-methyluridine-3'-phosphate 5'phosphate
  modified_base 2: mod_base = OTHER; note = 2'-deoxy-2'-fluoroadenosine-3'-phosphate
  modified_base 3: mod_base = OTHER; note = 2'-O-methylguanosine-3'-phosphate
  modified_base 4: mod_base = OTHER; note = 2'-O-methyladenosine-3'-phosphate
  modified_base 5: mod_base = OTHER; note = 2'-O-methyladenosine-3'-phosphate
  modified_base 6: mod_base = OTHER; note = 2'-deoxy-2'-fluoroguanosine-3'-phosphate
  modified_base 7: mod_base = OTHER; note = 2'-O-methylguanosine-3'-phosphate
  modified_base 8: mod_base = OTHER; note = 2'-O-methylcytidine-3'-phosphate
  modified_base 9: mod_base = OTHER; note = 2'-O-methylcytidine-3'-phosphate
  modified_base 10: mod_base = OTHER; note = 2'-O-methyladenosine-3'-phosphate
  modified_base 11: mod_base = OTHER; note = 2'-O-methylguanosine-3'-phosphate
  modified_base 12: mod_base = OTHER; note = 2'-O-methylcytidine-3'-phosphate
  modified_base 13: mod_base = OTHER; note = 2'-O-methyluridine-3'-phosphate
  modified_base 14: mod_base = OTHER; note = 2'-deoxy-2'-fluorocytidine-3'-phosphate
  modified_base 15: mod_base = OTHER; note = 2'-O-methylcytidine-3'-phosphate
  modified_base 16: mod_base = OTHER; note = 2'-deoxy-2'-fluoroadenosine-3'-phosphate
  modified_base 17: mod_base = OTHER; note = 2'-O-methyladenosine-3'-phosphate
  modified_base 18: mod_base = OTHER; note = 2'-O-methyladenosine-3'-phosphate
  modified_base 19: mod_base = OTHER; note = 2'-O-methyladenosine-3'-phosphate
  modified_base 20: mod_base = OTHER; note = 2'-O-methylguanosine-3'-phosphate
  modified_base 21: mod_base = OTHER; note = 2'-O-methyluridine-3'-phosphate
  modified_base 22: mod_base = OTHER; note = 2'-O-methyladenosine-3'-phosphate
  modified_base 23: mod_base = OTHER; note = 2'-O-methylcytidine
tagaaggccagctccaaaagtac

SEQ ID NO: 5192 - RNA, 23 nt, synthetic construct
  source 1..23: mol_type = other RNA
  modified_base 1: mod_base = OTHER; note = 2'-O-methyluridine-3'-phosphate 5'phosphate
  modified_base 2: mod_base = OTHER; note = 2'-deoxy-2'-fluorouridine-3'-phosphate
  modified_base 3: mod_base = OTHER; note = 2'-O-methyluridine-3'-phosphate
  modified_base 4: mod_base = OTHER; note = 2'-O-methylguanosine-3'-phosphate
  modified_base 5: mod_base = OTHER; note = 2'-O-methyladenosine-3'-phosphate
  modified_base 6: mod_base = OTHER; note = 2'-deoxy-2'-fluoroguanosine-3'-phosphate
  modified_base 7: mod_base = OTHER; note = 2'-O-methyladenosine-3'-phosphate
  modified_base 8: mod_base = OTHER; note = 2'-O-methyladenosine-3'-phosphate
  modified_base 9: mod_base = OTHER; note = 2'-O-methylguanosine-3'-phosphate
  modified_base 10: mod_base = OTHER; note = 2'-O-methylguanosine-3'-phosphate
  modified_base 11: mod_base = OTHER; note = 2'-O-methylcytidine-3'-phosphate
  modified_base 12: mod_base = OTHER; note = 2'-O-methylcytidine-3'-phosphate
  modified_base 13: mod_base = OTHER; note = 2'-O-methyladenosine-3'-phosphate
  modified_base 14: mod_base = OTHER; note = 2'-deoxy-2'-fluoroguanosine-3'-phosphate
  modified_base 15: mod_base = OTHER; note = 2'-O-methylcytidine-3'-phosphate
  modified_base 16: mod_base = OTHER; note = 2'-deoxy-2'-fluorouridine-3'-phosphate
  modified_base 17: mod_base = OTHER; note = 2'-O-methylcytidine-3'-phosphate
  modified_base 18: mod_base = OTHER; note = 2'-O-methylcytidine-3'-phosphate
  modified_base 19: mod_base = OTHER; note = 2'-O-methyladenosine-3'-phosphate
  modified_base 20: mod_base = OTHER; note = 2'-O-methyladenosine-3'-phosphate
  modified_base 21: mod_base = OTHER; note = 2'-O-methyladenosine-3'-phosphate
  modified_base 22: mod_base = OTHER; note = 2'-O-methyladenosine-3'-phosphate
  modified_base 23: mod_base = OTHER; note = 2'-O-methylguanosine
tttgagaaggccagctccaaaag

SEQ ID NO: 5193 - RNA, 23 nt, synthetic construct
  source 1..23: mol_type = other RNA
  modified_base 1: mod_base = OTHER; note = 2'-O-methyluridine-3'-phosphate 5'phosphate
  modified_base 2: mod_base = OTHER; note = 2'-deoxy-2'-fluorocytidine-3'-phosphate
  modified_base 3: mod_base = OTHER; note = 2'-O-methyluridine-3'-phosphate
  modified_base 4: mod_base = OTHER; note = 2'-O-methyluridine-3'-phosphate
  modified_base 5: mod_base = OTHER; note = 2'-O-methylguanosine-3'-phosphate
  modified_base 6: mod_base = OTHER; note = 2'-deoxy-2'-fluoroadenosine-3'-phosphate
  modified_base 7: mod_base = OTHER; note = 2'-O-methylguanosine-3'-phosphate
  modified_base 8: mod_base = OTHER; note = 2'-O-methyladenosine-3'-phosphate
  modified_base 9: mod_base = OTHER; note = 2'-O-methyladenosine-3'-phosphate
  modified_base 10: mod_base = OTHER; note = 2'-O-methylguanosine-3'-phosphate
  modified_base 11: mod_base = OTHER; note = 2'-O-methylguanosine-3'-phosphate
  modified_base 12: mod_base = OTHER; note = 2'-O-methylcytidine-3'-phosphate
  modified_base 13: mod_base = OTHER; note = 2'-O-methylcytidine-3'-phosphate
  modified_base 14: mod_base = OTHER; note = 2'-deoxy-2'-fluoroadenosine-3'-phosphate
  modified_base 15: mod_base = OTHER; note = 2'-O-methylguanosine-3'-phosphate
  modified_base 16: mod_base = OTHER; note = 2'-deoxy-2'-fluorocytidine-3'-phosphate
  modified_base 17: mod_base = OTHER; note = 2'-O-methyluridine-3'-phosphate
  modified_base 18: mod_base = OTHER; note = 2'-O-methylcytidine-3'-phosphate
  modified_base 19: mod_base = OTHER; note = 2'-O-methylcytidine-3'-phosphate
  modified_base 20: mod_base = OTHER; note = 2'-O-methyladenosine-3'-phosphate
  modified_base 21: mod_base = OTHER; note = 2'-O-methyladenosine-3'-phosphate
  modified_base 22: mod_base = OTHER; note = 2'-O-methyladenosine-3'-phosphate
  modified_base 23: mod_base = OTHER; note = 2'-O-methyladenosine
tcttgagaaggccagctccaaaa

SEQ ID NO: 5194 - RNA, 23 nt, synthetic construct
  source 1..23: mol_type = other RNA
  modified_base 1: mod_base = OTHER; note = 2'-O-methyluridine-3'-phosphate 5'phosphate
  modified_base 2: mod_base = OTHER; note = 2'-deoxy-2'-fluorocytidine-3'-phosphate
  modified_base 3: mod_base = OTHER; note = 2'-O-methylcytidine-3'-phosphate
  modified_base 4: mod_base = OTHER; note = 2'-O-methyluridine-3'-phosphate
  modified_base 5: mod_base = OTHER; note = 2'-O-methyluridine-3'-phosphate
  modified_base 6: mod_base = OTHER; note = 2'-deoxy-2'-fluoroguanosine-3'-phosphate
  modified_base 7: mod_base = OTHER; note = 2'-O-methyladenosine-3'-phosphate
  modified_base 8: mod_base = OTHER; note = 2'-O-methylguanosine-3'-phosphate
  modified_base 9: mod_base = OTHER; note = 2'-O-methyladenosine-3'-phosphate
  modified_base 10: mod_base = OTHER; note = 2'-O-methyladenosine-3'-phosphate
  modified_base 11: mod_base = OTHER; note = 2'-O-methylguanosine-3'-phosphate
  modified_base 12: mod_base = OTHER; note = 2'-O-methylguanosine-3'-phosphate
  modified_base 13: mod_base = OTHER; note = 2'-O-methylcytidine-3'-phosphate
  modified_base 14: mod_base = OTHER; note = 2'-deoxy-2'-fluorocytidine-3'-phosphate
  modified_base 15: mod_base = OTHER; note = 2'-O-methyladenosine-3'-phosphate
  modified_base 16: mod_base = OTHER; note = 2'-deoxy-2'-fluoroguanosine-3'-phosphate
  modified_base 17: mod_base = OTHER; note = 2'-O-methylcytidine-3'-phosphate
  modified_base 18: mod_base = OTHER; note = 2'-O-methyluridine-3'-phosphate
  modified_base 19: mod_base = OTHER; note = 2'-O-methylcytidine-3'-phosphate
  modified_base 20: mod_base = OTHER; note = 2'-O-methylcytidine-3'-phosphate
  modified_base 21: mod_base = OTHER; note = 2'-O-methyladenosine-3'-phosphate
  modified_base 22: mod_base = OTHER; note = 2'-O-methyladenosine-3'-phosphate
  modified_base 23: mod_base = OTHER; note = 2'-O-methyladenosine
tccttgagaaggccagctccaaa

SEQ ID NO: 5195 - RNA, 23 nt, synthetic construct
  source 1..23: mol_type = other RNA
  modified_base 1: mod_base = OTHER; note = 2'-O-methyluridine-3'-phosphate 5'phosphate
  modified_base 2: mod_base = OTHER; note = 2'-deoxy-2'-fluorouridine-3'-phosphate
  modified_base 3: mod_base = OTHER; note = 2'-O-methylcytidine-3'-phosphate
  modified_base 4: mod_base = OTHER; note = 2'-O-methylcytidine-3'-phosphate
  modified_base 5: mod_base = OTHER; note = 2'-O-methyluridine-3'-phosphate
  modified_base 6: mod_base = OTHER; note = 2'-deoxy-2'-fluorouridine-3'-phosphate
  modified_base 7: mod_base = OTHER; note = 2'-O-methylguanosine-3'-phosphate
  modified_base 8: mod_base = OTHER; note = 2'-O-methyladenosine-3'-phosphate
  modified_base 9: mod_base = OTHER; note = 2'-O-methylguanosine-3'-phosphate
  modified_base 10: mod_base = OTHER; note = 2'-O-methyladenosine-3'-phosphate
  modified_base 11: mod_base = OTHER; note = 2'-O-methyladenosine-3'-phosphate
  modified_base 12: mod_base = OTHER; note = 2'-O-methylguanosine-3'-phosphate
  modified_base 13: mod_base = OTHER; note = 2'-O-methylguanosine-3'-phosphate
  modified_base 14: mod_base = OTHER; note = 2'-deoxy-2'-fluorocytidine-3'-phosphate
  modified_base 15: mod_base = OTHER; note = 2'-O-methylcytidine-3'-phosphate
  modified_base 16: mod_base = OTHER; note = 2'-deoxy-2'-fluoroadenosine-3'-phosphate
  modified_base 17: mod_base = OTHER; note = 2'-O-methylguanosine-3'-phosphate
  modified_base 18: mod_base = OTHER; note = 2'-O-methylcytidine-3'-phosphate
  modified_base 19: mod_base = OTHER; note = 2'-O-methyluridine-3'-phosphate
  modified_base 20: mod_base = OTHER; note = 2'-O-methylcytidine-3'-phosphate
  modified_base 21: mod_base = OTHER; note = 2'-O-methylcytidine-3'-phosphate
  modified_base 22: mod_base = OTHER; note = 2'-O-methyladenosine-3'-phosphate
  modified_base 23: mod_base = OTHER; note = 2'-O-methyladenosine
ttccttgagaaggccagctccaa

SEQ ID NO: 5196 - RNA, 23 nt, synthetic construct
  source 1..23: mol_type = other RNA
  modified_base 1: mod_base = OTHER; note = 2'-O-methyluridine-3'-phosphate 5'phosphate
  modified_base 2: mod_base = OTHER; note = 2'-deoxy-2'-fluorouridine-3'-phosphate
  modified_base 3: mod_base = OTHER; note = 2'-O-methylcytidine-3'-phosphate
  modified_base 4: mod_base = OTHER; note = 2'-O-methyladenosine-3'-phosphate
  modified_base 5: mod_base = OTHER; note = 2'-O-methylcytidine-3'-phosphate
  modified_base 6: mod_base = OTHER; note = 2'-deoxy-2'-fluoroadenosine-3'-phosphate
  modified_base 7: mod_base = OTHER; note = 2'-O-methylguanosine-3'-phosphate
  modified_base 8: mod_base = OTHER; note = 2'-O-methylguanosine-3'-phosphate
  modified_base 9: mod_base = OTHER; note = 2'-O-methylguanosine-3'-phosphate
  modified_base 10: mod_base = OTHER; note = 2'-O-methyladenosine-3'-phosphate
  modified_base 11: mod_base = OTHER; note = 2'-O-methylguanosine-3'-phosphate
  modified_base 12: mod_base = OTHER; note = 2'-O-methylcytidine-3'-phosphate
  modified_base 13: mod_base = OTHER; note = 2'-O-methyluridine-3'-phosphate
  modified_base 14: mod_base = OTHER; note = 2'-deoxy-2'-fluoroguanosine-3'-phosphate
  modified_base 15: mod_base = OTHER; note = 2'-O-methylguanosine-3'-phosphate
  modified_base 16: mod_base = OTHER; note = 2'-deoxy-2'-fluoroguanosine-3'-phosphate
  modified_base 17: mod_base = OTHER; note = 2'-O-methylcytidine-3'-phosphate
  modified_base 18: mod_base = OTHER; note = 2'-O-methyluridine-3'-phosphate
  modified_base 19: mod_base = OTHER; note = 2'-O-methyluridine-3'-phosphate
  modified_base 20: mod_base = OTHER; note = 2'-O-methylcytidine-3'-phosphate
  modified_base 21: mod_base = OTHER; note = 2'-O-methylcytidine-3'-phosphate
  modified_base 22: mod_base = OTHER; note = 2'-O-methyluridine-3'-phosphate
  modified_base 23: mod_base = OTHER; note = 2'-O-methyluridine
ttcacagggagctgggcttcctt

SEQ ID NO: 5197 - RNA, 23 nt, synthetic construct
  source 1..23: mol_type = other RNA
  modified_base 1: mod_base = OTHER; note = 2'-O-methyluridine-3'-phosphate 5'phosphate
  modified_base 2: mod_base = OTHER; note = 2'-deoxy-2'-fluoroadenosine-3'-phosphate
  modified_base 3: mod_base = OTHER; note = 2'-O-methyluridine-3'-phosphate
  modified_base 4: mod_base = OTHER; note = 2'-O-methylcytidine-3'-phosphate
  modified_base 5: mod_base = OTHER; note = 2'-O-methyladenosine-3'-phosphate
  modified_base 6: mod_base = OTHER; note = 2'-deoxy-2'-fluorocytidine-3'-phosphate
  modified_base 7: mod_base = OTHER; note = 2'-O-methyladenosine-3'-phosphate
  modified_base 8: mod_base = OTHER; note = 2'-O-methylguanosine-3'-phosphate
  modified_base 9: mod_base = OTHER; note = 2'-O-methylguanosine-3'-phosphate
  modified_base 10: mod_base = OTHER; note = 2'-O-methylguanosine-3'-phosphate
  modified_base 11: mod_base = OTHER; note = 2'-O-methyladenosine-3'-phosphate
  modified_base 12: mod_base = OTHER; note = 2'-O-methylguanosine-3'-phosphate
  modified_base 13: mod_base = OTHER; note = 2'-O-methylcytidine-3'-phosphate
  modified_base 14: mod_base = OTHER; note = 2'-deoxy-2'-fluorouridine-3'-phosphate
  modified_base 15: mod_base = OTHER; note = 2'-O-methylguanosine-3'-phosphate
  modified_base 16: mod_base = OTHER; note = 2'-deoxy-2'-fluoroguanosine-3'-phosphate
  modified_base 17: mod_base = OTHER; note = 2'-O-methylguanosine-3'-phosphate
  modified_base 18: mod_base = OTHER; note = 2'-O-methylcytidine-3'-phosphate
  modified_base 19: mod_base = OTHER; note = 2'-O-methyluridine-3'-phosphate
  modified_base 20: mod_base = OTHER; note = 2'-O-methyluridine-3'-phosphate
  modified_base 21: mod_base = OTHER; note = 2'-O-methylcytidine-3'-phosphate
  modified_base 22: mod_base = OTHER; note = 2'-O-methylcytidine-3'-phosphate
  modified_base 23: mod_base = OTHER; note = 2'-O-methyluridine
tatcacagggagctgggcttcct

SEQ ID NO: 5198 - RNA, 23 nt, synthetic construct
  source 1..23: mol_type = other RNA
  modified_base 1: mod_base = OTHER; note = 2'-O-methyluridine-3'-phosphate 5'phosphate
  modified_base 2: mod_base = OTHER; note = 2'-deoxy-2'-fluoroadenosine-3'-phosphate
  modified_base 3: mod_base = OTHER; note = 2'-O-methyladenosine-3'-phosphate
  modified_base 4: mod_base = OTHER; note = 2'-O-methyluridine-3'-phosphate
  modified_base 5: mod_base = OTHER; note = 2'-O-methylcytidine-3'-phosphate
  modified_base 6: mod_base = OTHER; note = 2'-deoxy-2'-fluoroadenosine-3'-phosphate
  modified_base 7: mod_base = OTHER; note = 2'-O-methylcytidine-3'-phosphate
  modified_base 8: mod_base = OTHER; note = 2'-O-methyladenosine-3'-phosphate
  modified_base 9: mod_base = OTHER; note = 2'-O-methylguanosine-3'-phosphate
  modified_base 10: mod_base = OTHER; note = 2'-O-methylguanosine-3'-phosphate
  modified_base 11: mod_base = OTHER; note = 2'-O-methylguanosine-3'-phosphate
  modified_base 12: mod_base = OTHER; note = 2'-O-methyladenosine-3'-phosphate
  modified_base 13: mod_base = OTHER; note = 2'-O-methylguanosine-3'-phosphate
  modified_base 14: mod_base = OTHER; note = 2'-deoxy-2'-fluorocytidine-3'-phosphate
  modified_base 15: mod_base = OTHER; note = 2'-O-methyluridine-3'-phosphate
  modified_base 16: mod_base = OTHER; note = 2'-deoxy-2'-fluoroguanosine-3'-phosphate
  modified_base 17: mod_base = OTHER; note = 2'-O-methylguanosine-3'-phosphate
  modified_base 18: mod_base = OTHER; note = 2'-O-methylguanosine-3'-phosphate
  modified_base 19: mod_base = OTHER; note = 2'-O-methylcytidine-3'-phosphate
  modified_base 20: mod_base = OTHER; note = 2'-O-methyluridine-3'-phosphate
  modified_base 21: mod_base = OTHER; note = 2'-O-methyluridine-3'-phosphate
  modified_base 22: mod_base = OTHER; note = 2'-O-methylcytidine-3'-phosphate
  modified_base 23: mod_base = OTHER; note = 2'-O-methylcytidine
taatcacagggagctgggcttcc

SEQ ID NO: 5199 - RNA, 23 nt, synthetic construct
  source 1..23: mol_type = other RNA
  modified_base 1: mod_base = OTHER; note = 2'-O-methyluridine-3'-phosphate 5'phosphate
  modified_base 2: mod_base = OTHER; note = 2'-deoxy-2'-fluorocytidine-3'-phosphate
  modified_base 3: mod_base = OTHER; note = 2'-O-methyladenosine-3'-phosphate
  modified_base 4: mod_base = OTHER; note = 2'-O-methyladenosine-3'-phosphate
  modified_base 5: mod_base = OTHER; note = 2'-O-methyluridine-3'-phosphate
  modified_base 6: mod_base = OTHER; note = 2'-deoxy-2'-fluorocytidine-3'-phosphate
  modified_base 7: mod_base = OTHER; note = 2'-O-methyladenosine-3'-phosphate
  modified_base 8: mod_base = OTHER; note = 2'-O-methylcytidine-3'-phosphate
  modified_base 9: mod_base = OTHER; note = 2'-O-methyladenosine-3'-phosphate
  modified_base 10: mod_base = OTHER; note = 2'-O-methylguanosine-3'-phosphate
  modified_base 11: mod_base = OTHER; note = 2'-O-methylguanosine-3'-phosphate
  modified_base 12: mod_base = OTHER; note = 2'-O-methylguanosine-3'-phosphate
  modified_base 13: mod_base = OTHER; note = 2'-O-methyladenosine-3'-phosphate
  modified_base 14: mod_base = OTHER; note = 2'-deoxy-2'-fluoroguanosine-3'-phosphate
  modified_base 15: mod_base = OTHER; note = 2'-O-methylcytidine-3'-phosphate
  modified_base 16: mod_base = OTHER; note = 2'-deoxy-2'-fluorouridine-3'-phosphate
  modified_base 17: mod_base = OTHER; note = 2'-O-methylguanosine-3'-phosphate
  modified_base 18: mod_base = OTHER; note = 2'-O-methylguanosine-3'-phosphate
  modified_base 19: mod_base = OTHER; note = 2'-O-methylguanosine-3'-phosphate
  modified_base 20: mod_base = OTHER; note = 2'-O-methylcytidine-3'-phosphate
  modified_base 21: mod_base = OTHER; note = 2'-O-methyluridine-3'-phosphate
  modified_base 22: mod_base = OTHER; note = 2'-O-methyluridine-3'-phosphate
  modified_base 23: mod_base = OTHER; note = 2'-O-methylcytidine
tcaatcacagggagctgggcttc

SEQ ID NO: 5200 - RNA, 23 nt, synthetic construct
  source 1..23: mol_type = other RNA
  modified_base 1: mod_base = OTHER; note = 2'-O-methyluridine-3'-phosphate 5'phosphate
  modified_base 2: mod_base = OTHER; note = 2'-deoxy-2'-fluorouridine-3'-phosphate
  modified_base 3: mod_base = OTHER; note = 2'-O-methylcytidine-3'-phosphate
  modified_base 4: mod_base = OTHER; note = 2'-O-methyladenosine-3'-phosphate
  modified_base 5: mod_base = OTHER; note = 2'-O-methyladenosine-3'-phosphate
  modified_base 6: mod_base = OTHER; note = 2'-deoxy-2'-fluorouridine-3'-phosphate
  modified_base 7: mod_base = OTHER; note = 2'-O-methylcytidine-3'-phosphate
  modified_base 8: mod_base = OTHER; note = 2'-O-methyladenosine-3'-phosphate
  modified_base 9: mod_base = OTHER; note = 2'-O-methylcytidine-3'-phosphate
  modified_base 10: mod_base = OTHER; note = 2'-O-methyladenosine-3'-phosphate
  modified_base 11: mod_base = OTHER; note = 2'-O-methylguanosine-3'-phosphate
  modified_base 12: mod_base = OTHER; note = 2'-O-methylguanosine-3'-phosphate
  modified_base 13: mod_base = OTHER; note = 2'-O-methylguanosine-3'-phosphate
  modified_base 14: mod_base = OTHER; note = 2'-deoxy-2'-fluoroadenosine-3'-phosphate
  modified_base 15: mod_base = OTHER; note = 2'-O-methylguanosine-3'-phosphate
  modified_base 16: mod_base = OTHER; note = 2'-deoxy-2'-fluorocytidine-3'-phosphate
  modified_base 17: mod_base = OTHER; note = 2'-O-methyluridine-3'-phosphate
  modified_base 18: mod_base = OTHER; note = 2'-O-methylguanosine-3'-phosphate
  modified_base 19: mod_base = OTHER; note = 2'-O-methylguanosine-3'-phosphate
  modified_base 20: mod_base = OTHER; note = 2'-O-methylguanosine-3'-phosphate
  modified_base 21: mod_base = OTHER; note = 2'-O-methylcytidine-3'-phosphate
  modified_base 22: mod_base = OTHER; note = 2'-O-methyluridine-3'-phosphate
  modified_base 23: mod_base = OTHER; note = 2'-O-methyluridine
ttcaatcacagggagctgggctt

SEQ ID NO: 5201 - RNA, 23 nt, synthetic construct
  source 1..23: mol_type = other RNA
  modified_base 1: mod_base = OTHER; note = 2'-O-methyluridine-3'-phosphate 5'phosphate
  modified_base 2: mod_base = OTHER; note = 2'-deoxy-2'-fluorocytidine-3'-phosphate
  modified_base 3: mod_base = OTHER; note = 2'-O-methyluridine-3'-phosphate
  modified_base 4: mod_base = OTHER; note = 2'-O-methylcytidine-3'-phosphate
  modified_base 5: mod_base = OTHER; note = 2'-O-methyladenosine-3'-phosphate
  modified_base 6: mod_base = OTHER; note = 2'-deoxy-2'-fluoroadenosine-3'-phosphate
  modified_base 7: mod_base = OTHER; note = 2'-O-methyluridine-3'-phosphate
  modified_base 8: mod_base = OTHER; note = 2'-O-methylcytidine-3'-phosphate
  modified_base 9: mod_base = OTHER; note = 2'-O-methyladenosine-3'-phosphate
  modified_base 10: mod_base = OTHER; note = 2'-O-methylcytidine-3'-phosphate
  modified_base 11: mod_base = OTHER; note = 2'-O-methyladenosine-3'-phosphate
  modified_base 12: mod_base = OTHER; note = 2'-O-methylguanosine-3'-phosphate
  modified_base 13: mod_base = OTHER; note = 2'-O-methylguanosine-3'-phosphate
  modified_base 14: mod_base = OTHER; note = 2'-deoxy-2'-fluoroguanosine-3'-phosphate
  modified_base 15: mod_base = OTHER; note = 2'-O-methyladenosine-3'-phosphate
  modified_base 16: mod_base = OTHER; note = 2'-deoxy-2'-fluoroguanosine-3'-phosphate
  modified_base 17: mod_base = OTHER; note = 2'-O-methylcytidine-3'-phosphate
  modified_base 18: mod_base = OTHER; note = 2'-O-methyluridine-3'-phosphate
  modified_base 19: mod_base = OTHER; note = 2'-O-methylguanosine-3'-phosphate
  modified_base 20: mod_base = OTHER; note = 2'-O-methylguanosine-3'-phosphate
  modified_base 21: mod_base = OTHER; note = 2'-O-methylguanosine-3'-phosphate
  modified_base 22: mod_base = OTHER; note = 2'-O-methylcytidine-3'-phosphate
  modified_base 23: mod_base = OTHER; note = 2'-O-methyluridine
tctcaatcacagggagctgggct

SEQ ID NO: 5202 - RNA, 23 nt, synthetic construct
  source 1..23: mol_type = other RNA
  modified_base 1: mod_base = OTHER; note = 2'-O-methyluridine-3'-phosphate 5'phosphate
  modified_base 2: mod_base = OTHER; note = 2'-deoxy-2'-fluorouridine-3'-phosphate
  modified_base 3: mod_base = OTHER; note = 2'-O-methylcytidine-3'-phosphate
  modified_base 4: mod_base = OTHER; note = 2'-O-methyluridine-3'-phosphate
  modified_base 5: mod_base = OTHER; note = 2'-O-methylcytidine-3'-phosphate
  modified_base 6: mod_base = OTHER; note = 2'-deoxy-2'-fluoroadenosine-3'-phosphate
  modified_base 7: mod_base = OTHER; note = 2'-O-methyladenosine-3'-phosphate
  modified_base 8: mod_base = OTHER; note = 2'-O-methyluridine-3'-phosphate
  modified_base 9: mod_base = OTHER; note = 2'-O-methylcytidine-3'-phosphate
  modified_base 10: mod_base = OTHER; note = 2'-O-methyladenosine-3'-phosphate
  modified_base 11: mod_base = OTHER; note = 2'-O-methylcytidine-3'-phosphate
  modified_base 12: mod_base = OTHER; note = 2'-O-methyladenosine-3'-phosphate
  modified_base 13: mod_base = OTHER; note = 2'-O-methylguanosine-3'-phosphate
  modified_base 14: mod_base = OTHER; note = 2'-deoxy-2'-fluoroguanosine-3'-phosphate
  modified_base 15: mod_base = OTHER; note = 2'-O-methylguanosine-3'-phosphate
  modified_base 16: mod_base = OTHER; note = 2'-deoxy-2'-fluoroadenosine-3'-phosphate
  modified_base 17: mod_base = OTHER; note = 2'-O-methylguanosine-3'-phosphate
  modified_base 18: mod_base = OTHER; note = 2'-O-methylcytidine-3'-phosphate
  modified_base 19: mod_base = OTHER; note = 2'-O-methyluridine-3'-phosphate
  modified_base 20: mod_base = OTHER; note = 2'-O-methylguanosine-3'-phosphate
  modified_base 21: mod_base = OTHER; note = 2'-O-methylguanosine-3'-phosphate
  modified_base 22: mod_base = OTHER; note = 2'-O-methylguanosine-3'-phosphate
  modified_base 23: mod_base = OTHER; note = 2'-O-methylcytidine
ttctcaatcacagggagctgggc

SEQ ID NO: 5203 - RNA, 23 nt, synthetic construct
  source 1..23: mol_type = other RNA
  modified_base 1: mod_base = OTHER; note = 2'-O-methyluridine-3'-phosphate 5'phosphate
  modified_base 2: mod_base = OTHER; note = 2'-deoxy-2'-fluorouridine-3'-phosphate
  modified_base 3: mod_base = OTHER; note = 2'-O-methyluridine-3'-phosphate
  modified_base 4: mod_base = OTHER; note = 2'-O-methylcytidine-3'-phosphate
  modified_base 5: mod_base = OTHER; note = 2'-O-methyluridine-3'-phosphate
  modified_base 6: mod_base = OTHER; note = 2'-deoxy-2'-fluorocytidine-3'-phosphate
  modified_base 7: mod_base = OTHER; note = 2'-O-methyladenosine-3'-phosphate
  modified_base 8: mod_base = OTHER; note = 2'-O-methyladenosine-3'-phosphate
  modified_base 9: mod_base = OTHER; note = 2'-O-methyluridine-3'-phosphate
  modified_base 10: mod_base = OTHER; note = 2'-O-methylcytidine-3'-phosphate
  modified_base 11: mod_base = OTHER; note = 2'-O-methyladenosine-3'-phosphate
  modified_base 12: mod_base = OTHER; note = 2'-O-methylcytidine-3'-phosphate
  modified_base 13: mod_base = OTHER; note = 2'-O-methyladenosine-3'-phosphate
  modified_base 14: mod_base = OTHER; note = 2'-deoxy-2'-fluoroguanosine-3'-phosphate
  modified_base 15: mod_base = OTHER; note = 2'-O-methylguanosine-3'-phosphate
  modified_base 16: mod_base = OTHER; note = 2'-deoxy-2'-fluoroguanosine-3'-phosphate
  modified_base 17: mod_base = OTHER; note = 2'-O-methyladenosine-3'-phosphate
  modified_base 18: mod_base = OTHER; note = 2'-O-methylguanosine-3'-phosphate
  modified_base 19: mod_base = OTHER; note = 2'-O-methylcytidine-3'-phosphate
  modified_base 20: mod_base = OTHER; note = 2'-O-methyluridine-3'-phosphate
  modified_base 21: mod_base = OTHER; note = 2'-O-methylguanosine-3'-phosphate
  modified_base 22: mod_base = OTHER; note = 2'-O-methylguanosine-3'-phosphate
  modified_base 23: mod_base = OTHER; note = 2'-O-methylguanosine
tttctcaatcacagggagctggg

SEQ ID NO: 5204 - RNA, 23 nt, synthetic construct
  source 1..23: mol_type = other RNA
  modified_base 1: mod_base = OTHER; note = 2'-O-methyluridine-3'-phosphate 5'phosphate
  modified_base 2: mod_base = OTHER; note = 2'-deoxy-2'-fluoroadenosine-3'-phosphate
  modified_base 3: mod_base = OTHER; note = 2'-O-methyluridine-3'-phosphate
  modified_base 4: mod_base = OTHER; note = 2'-O-methyluridine-3'-phosphate
  modified_base 5: mod_base = OTHER; note = 2'-O-methylcytidine-3'-phosphate
  modified_base 6: mod_base = OTHER; note = 2'-deoxy-2'-fluorouridine-3'-phosphate
  modified_base 7: mod_base = OTHER; note = 2'-O-methylcytidine-3'-phosphate
  modified_base 8: mod_base = OTHER; note = 2'-O-methyladenosine-3'-phosphate
  modified_base 9: mod_base = OTHER; note = 2'-O-methyladenosine-3'-phosphate
  modified_base 10: mod_base = OTHER; note = 2'-O-methyluridine-3'-phosphate
  modified_base 11: mod_base = OTHER; note = 2'-O-methylcytidine-3'-phosphate
  modified_base 12: mod_base = OTHER; note = 2'-O-methyladenosine-3'-phosphate
  modified_base 13: mod_base = OTHER; note = 2'-O-methylcytidine-3'-phosphate
  modified_base 14: mod_base = OTHER; note = 2'-deoxy-2'-fluoroadenosine-3'-phosphate
  modified_base 15: mod_base = OTHER; note = 2'-O-methylguanosine-3'-phosphate
  modified_base 16: mod_base = OTHER; note = 2'-deoxy-2'-fluoroguanosine-3'-phosphate
  modified_base 17: mod_base = OTHER; note = 2'-O-methylguanosine-3'-phosphate
  modified_base 18: mod_base = OTHER; note = 2'-O-methyladenosine-3'-phosphate
  modified_base 19: mod_base = OTHER; note = 2'-O-methylguanosine-3'-phosphate
  modified_base 20: mod_base = OTHER; note = 2'-O-methylcytidine-3'-phosphate
  modified_base 21: mod_base = OTHER; note = 2'-O-methyluridine-3'-phosphate
  modified_base 22: mod_base = OTHER; note = 2'-O-methylguanosine-3'-phosphate
  modified_base 23: mod_base = OTHER; note = 2'-O-methylguanosine
tattctcaatcacagggagctgg

SEQ ID NO: 5205 - RNA, 23 nt, synthetic construct
  source 1..23: mol_type = other RNA
  modified_base 1: mod_base = OTHER; note = 2'-O-methyluridine-3'-phosphate 5'phosphate
  modified_base 2: mod_base = OTHER; note = 2'-deoxy-2'-fluorouridine-3'-phosphate
  modified_base 3: mod_base = OTHER; note = 2'-O-methyladenosine-3'-phosphate
  modified_base 4: mod_base = OTHER; note = 2'-O-methyluridine-3'-phosphate
  modified_base 5: mod_base = OTHER; note = 2'-O-methyluridine-3'-phosphate
  modified_base 6: mod_base = OTHER; note = 2'-deoxy-2'-fluorocytidine-3'-phosphate
  modified_base 7: mod_base = OTHER; note = 2'-O-methyluridine-3'-phosphate
  modified_base 8: mod_base = OTHER; note = 2'-O-methylcytidine-3'-phosphate
  modified_base 9: mod_base = OTHER; note = 2'-O-methyladenosine-3'-phosphate
  modified_base 10: mod_base = OTHER; note = 2'-O-methyladenosine-3'-phosphate
  modified_base 11: mod_base = OTHER; note = 2'-O-methyluridine-3'-phosphate
  modified_base 12: mod_base = OTHER; note = 2'-O-methylcytidine-3'-phosphate
  modified_base 13: mod_base = OTHER; note = 2'-O-methyladenosine-3'-phosphate
  modified_base 14: mod_base = OTHER; note = 2'-deoxy-2'-fluorocytidine-3'-phosphate
  modified_base 15: mod_base = OTHER; note = 2'-O-methyladenosine-3'-phosphate
  modified_base 16: mod_base = OTHER; note = 2'-deoxy-2'-fluoroguanosine-3'-phosphate
  modified_base 17: mod_base = OTHER; note = 2'-O-methylguanosine-3'-phosphate
  modified_base 18: mod_base = OTHER; note = 2'-O-methylguanosine-3'-phosphate
  modified_base 19: mod_base = OTHER; note = 2'-O-methyladenosine-3'-phosphate
  modified_base 20: mod_base = OTHER; note = 2'-O-methylguanosine-3'-phosphate
  modified_base 21: mod_base = OTHER; note = 2'-O-methylcytidine-3'-phosphate
  modified_base 22: mod_base = OTHER; note = 2'-O-methyluridine-3'-phosphate
  modified_base 23: mod_base = OTHER; note = 2'-O-methylguanosine
ttattctcaatcacagggagctg

SEQ ID NO: 5206 - RNA, 23 nt, synthetic construct
  source 1..23: mol_type = other RNA
  modified_base 1: mod_base = OTHER; note = 2'-O-methyluridine-3'-phosphate 5'phosphate
  modified_base 2: mod_base = OTHER; note = 2'-deoxy-2'-fluorouridine-3'-phosphate
  modified_base 3: mod_base = OTHER; note = 2'-O-methyluridine-3'-phosphate
  modified_base 4: mod_base = OTHER; note = 2'-O-methyladenosine-3'-phosphate
  modified_base 5: mod_base = OTHER; note = 2'-O-methyluridine-3'-phosphate
  modified_base 6: mod_base = OTHER; note = 2'-deoxy-2'-fluorouridine-3'-phosphate
  modified_base 7: mod_base = OTHER; note = 2'-O-methylcytidine-3'-phosphate
  modified_base 8: mod_base = OTHER; note = 2'-O-methyluridine-3'-phosphate
  modified_base 9: mod_base = OTHER; note = 2'-O-methylcytidine-3'-phosphate
  modified_base 10: mod_base = OTHER; note = 2'-O-methyladenosine-3'-phosphate
  modified_base 11: mod_base = OTHER; note = 2'-O-methyladenosine-3'-phosphate
  modified_base 12: mod_base = OTHER; note = 2'-O-methyluridine-3'-phosphate
  modified_base 13: mod_base = OTHER; note = 2'-O-methylcytidine-3'-phosphate
  modified_base 14: mod_base = OTHER; note = 2'-deoxy-2'-fluoroadenosine-3'-phosphate
  modified_base 15: mod_base = OTHER; note = 2'-O-methylcytidine-3'-phosphate
  modified_base 16: mod_base = OTHER; note = 2'-deoxy-2'-fluoroadenosine-3'-phosphate
  modified_base 17: mod_base = OTHER; note = 2'-O-methylguanosine-3'-phosphate
  modified_base 18: mod_base = OTHER; note = 2'-O-methylguanosine-3'-phosphate
  modified_base 19: mod_base = OTHER; note = 2'-O-methylguanosine-3'-phosphate
  modified_base 20: mod_base = OTHER; note = 2'-O-methyladenosine-3'-phosphate
  modified_base 21: mod_base = OTHER; note = 2'-O-methylguanosine-3'-phosphate
  modified_base 22: mod_base = OTHER; note = 2'-O-methylcytidine-3'-phosphate
  modified_base 23: mod_base = OTHER; note = 2'-O-methyluridine
tttattctcaatcacagggagct

SEQ ID NO: 5207 - RNA, 23 nt, synthetic construct
  source 1..23: mol_type = other RNA
  modified_base 1: mod_base = OTHER; note = 2'-O-methyluridine-3'-phosphate 5'phosphate
  modified_base 2: mod_base = OTHER; note = 2'-deoxy-2'-fluorouridine-3'-phosphate
  modified_base 3: mod_base = OTHER; note = 2'-O-methyluridine-3'-phosphate
  modified_base 4: mod_base = OTHER; note = 2'-O-methyluridine-3'-phosphate
  modified_base 5: mod_base = OTHER; note = 2'-O-methyladenosine-3'-phosphate
  modified_base 6: mod_base = OTHER; note = 2'-deoxy-2'-fluorouridine-3'-phosphate
  modified_base 7: mod_base = OTHER; note = 2'-O-methyluridine-3'-phosphate
  modified_base 8: mod_base = OTHER; note = 2'-O-methylcytidine-3'-phosphate
  modified_base 9: mod_base = OTHER; note = 2'-O-methyluridine-3'-phosphate
  modified_base 10: mod_base = OTHER; note = 2'-O-methylcytidine-3'-phosphate
  modified_base 11: mod_base = OTHER; note = 2'-O-methyladenosine-3'-phosphate
  modified_base 12: mod_base = OTHER; note = 2'-O-methyladenosine-3'-phosphate
  modified_base 13: mod_base = OTHER; note = 2'-O-methyluridine-3'-phosphate
  modified_base 14: mod_base = OTHER; note = 2'-deoxy-2'-fluorocytidine-3'-phosphate
  modified_base 15: mod_base = OTHER; note = 2'-O-methyladenosine-3'-phosphate
  modified_base 16: mod_base = OTHER; note = 2'-deoxy-2'-fluorocytidine-3'-phosphate
  modified_base 17: mod_base = OTHER; note = 2'-O-methyladenosine-3'-phosphate
  modified_base 18: mod_base = OTHER; note = 2'-O-methylguanosine-3'-phosphate
  modified_base 19: mod_base = OTHER; note = 2'-O-methylguanosine-3'-phosphate
  modified_base 20: mod_base = OTHER; note = 2'-O-methylguanosine-3'-phosphate
  modified_base 21: mod_base = OTHER; note = 2'-O-methyladenosine-3'-phosphate
  modified_base 22: mod_base = OTHER; note = 2'-O-methylguanosine-3'-phosphate
  modified_base 23: mod_base = OTHER; note = 2'-O-methylcytidine
ttttattctcaatcacagggagc

SEQ ID NO: 5208 - RNA, 23 nt, synthetic construct
  source 1..23: mol_type = other RNA
  modified_base 1: mod_base = OTHER; note = 2'-O-methyluridine-3'-phosphate 5'phosphate
  modified_base 2: mod_base = OTHER; note = 2'-deoxy-2'-fluorocytidine-3'-phosphate
  modified_base 3: mod_base = OTHER; note = 2'-O-methyluridine-3'-phosphate
  modified_base 4: mod_base = OTHER; note = 2'-O-methyluridine-3'-phosphate
  modified_base 5: mod_base = OTHER; note = 2'-O-methyluridine-3'-phosphate
  modified_base 6: mod_base = OTHER; note = 2'-deoxy-2'-fluoroadenosine-3'-phosphate
  modified_base 7: mod_base = OTHER; note = 2'-O-methyluridine-3'-phosphate
  modified_base 8: mod_base = OTHER; note = 2'-O-methyluridine-3'-phosphate
  modified_base 9: mod_base = OTHER; note = 2'-O-methylcytidine-3'-phosphate
  modified_base 10: mod_base = OTHER; note = 2'-O-methyluridine-3'-phosphate
  modified_base 11: mod_base = OTHER; note = 2'-O-methylcytidine-3'-phosphate
  modified_base 12: mod_base = OTHER; note = 2'-O-methyladenosine-3'-phosphate
  modified_base 13: mod_base = OTHER; note = 2'-O-methyladenosine-3'-phosphate
  modified_base 14: mod_base = OTHER; note = 2'-deoxy-2'-fluorouridine-3'-phosphate
  modified_base 15: mod_base = OTHER; note = 2'-O-methylcytidine-3'-phosphate
  modified_base 16: mod_base = OTHER; note = 2'-deoxy-2'-fluoroadenosine-3'-phosphate
  modified_base 17: mod_base = OTHER; note = 2'-O-methylcytidine-3'-phosphate
  modified_base 18: mod_base = OTHER; note = 2'-O-methyladenosine-3'-phosphate
  modified_base 19: mod_base = OTHER; note = 2'-O-methylguanosine-3'-phosphate
  modified_base 20: mod_base = OTHER; note = 2'-O-methylguanosine-3'-phosphate
  modified_base 21: mod_base = OTHER; note = 2'-O-methylguanosine-3'-phosphate
  modified_base 22: mod_base = OTHER; note = 2'-O-methyladenosine-3'-phosphate
  modified_base 23: mod_base = OTHER; note = 2'-O-methylguanosine
tctttattctcaatcacagggag

SEQ ID NO: 5209 - RNA, 23 nt, synthetic construct
  source 1..23: mol_type = other RNA
  modified_base 1: mod_base = OTHER; note = 2'-O-methyluridine-3'-phosphate 5'phosphate
  modified_base 2: mod_base = OTHER; note = 2'-deoxy-2'-fluoroadenosine-3'-phosphate
  modified_base 3: mod_base = OTHER; note = 2'-O-methylcytidine-3'-phosphate
  modified_base 4: mod_base = OTHER; note = 2'-O-methyluridine-3'-phosphate
  modified_base 5: mod_base = OTHER; note = 2'-O-methyluridine-3'-phosphate
  modified_base 6: mod_base = OTHER; note = 2'-deoxy-2'-fluorouridine-3'-phosphate
  modified_base 7: mod_base = OTHER; note = 2'-O-methyladenosine-3'-phosphate
  modified_base 8: mod_base = OTHER; note = 2'-O-methyluridine-3'-phosphate
  modified_base 9: mod_base = OTHER; note = 2'-O-methyluridine-3'-phosphate
  modified_base 10: mod_base = OTHER; note = 2'-O-methylcytidine-3'-phosphate
  modified_base 11: mod_base = OTHER; note = 2'-O-methyluridine-3'-phosphate
  modified_base 12: mod_base = OTHER; note = 2'-O-methylcytidine-3'-phosphate
  modified_base 13: mod_base = OTHER; note = 2'-O-methyladenosine-3'-phosphate
  modified_base 14: mod_base = OTHER; note = 2'-deoxy-2'-fluoroadenosine-3'-phosphate
  modified_base 15: mod_base = OTHER; note = 2'-O-methyluridine-3'-phosphate
  modified_base 16: mod_base = OTHER; note = 2'-deoxy-2'-fluorocytidine-3'-phosphate
  modified_base 17: mod_base = OTHER; note = 2'-O-methyladenosine-3'-phosphate
  modified_base 18: mod_base = OTHER; note = 2'-O-methylcytidine-3'-phosphate
  modified_base 19: mod_base = OTHER; note = 2'-O-methyladenosine-3'-phosphate
  modified_base 20: mod_base = OTHER; note = 2'-O-methylguanosine-3'-phosphate
  modified_base 21: mod_base = OTHER; note = 2'-O-methylguanosine-3'-phosphate
  modified_base 22: mod_base = OTHER; note = 2'-O-methylguanosine-3'-phosphate
  modified_base 23: mod_base = OTHER; note = 2'-O-methyladenosine
tactttattctcaatcacaggga

SEQ ID NO: 5210 - RNA, 23 nt, synthetic construct
  source 1..23: mol_type = other RNA
  modified_base 1: mod_base = OTHER; note = 2'-O-methyluridine-3'-phosphate 5'phosphate
  modified_base 2: mod_base = OTHER; note = 2'-deoxy-2'-fluorocytidine-3'-phosphate
  modified_base 3: mod_base = OTHER; note = 2'-O-methyladenosine-3'-phosphate
  modified_base 4: mod_base = OTHER; note = 2'-O-methylcytidine-3'-phosphate
  modified_base 5: mod_base = OTHER; note = 2'-O-methyluridine-3'-phosphate
  modified_base 6: mod_base = OTHER; note = 2'-deoxy-2'-fluorouridine-3'-phosphate
  modified_base 7: mod_base = OTHER; note = 2'-O-methyluridine-3'-phosphate
  modified_base 8: mod_base = OTHER; note = 2'-O-methyladenosine-3'-phosphate
  modified_base 9: mod_base = OTHER; note = 2'-O-methyluridine-3'-phosphate
  modified_base 10: mod_base = OTHER; note = 2'-O-methyluridine-3'-phosphate
  modified_base 11: mod_base = OTHER; note = 2'-O-methylcytidine-3'-phosphate
  modified_base 12: mod_base = OTHER; note = 2'-O-methyluridine-3'-phosphate
  modified_base 13: mod_base = OTHER; note = 2'-O-methylcytidine-3'-phosphate
  modified_base 14: mod_base = OTHER; note = 2'-deoxy-2'-fluoroadenosine-3'-phosphate
  modified_base 15: mod_base = OTHER; note = 2'-O-methyladenosine-3'-phosphate
  modified_base 16: mod_base = OTHER; note = 2'-deoxy-2'-fluorouridine-3'-phosphate
  modified_base 17: mod_base = OTHER; note = 2'-O-methylcytidine-3'-phosphate
  modified_base 18: mod_base = OTHER; note = 2'-O-methyladenosine-3'-phosphate
  modified_base 19: mod_base = OTHER; note = 2'-O-methylcytidine-3'-phosphate
  modified_base 20: mod_base = OTHER; note = 2'-O-methyladenosine-3'-phosphate
  modified_base 21: mod_base = OTHER; note = 2'-O-methylguanosine-3'-phosphate
  modified_base 22: mod_base = OTHER; note = 2'-O-methylguanosine-3'-phosphate
  modified_base 23: mod_base = OTHER; note = 2'-O-methylguanosine
tcactttattctcaatcacaggg

SEQ ID NO: 5211 - RNA, 23 nt, synthetic construct
  source 1..23: mol_type = other RNA
  modified_base 1: mod_base = OTHER; note = 2'-O-methyluridine-3'-phosphate 5'phosphate
  modified_base 2: mod_base = OTHER; note = 2'-deoxy-2'-fluoroadenosine-3'-phosphate
  modified_base 3: mod_base = OTHER; note = 2'-O-methylcytidine-3'-phosphate
  modified_base 4: mod_base = OTHER; note = 2'-O-methyladenosine-3'-phosphate
  modified_base 5: mod_base = OTHER; note = 2'-O-methylcytidine-3'-phosphate
  modified_base 6: mod_base = OTHER; note = 2'-deoxy-2'-fluorouridine-3'-phosphate
  modified_base 7: mod_base = OTHER; note = 2'-O-methyluridine-3'-phosphate
  modified_base 8: mod_base = OTHER; note = 2'-O-methyluridine-3'-phosphate
  modified_base 9: mod_base = OTHER; note = 2'-O-methyladenosine-3'-phosphate
  modified_base 10: mod_base = OTHER; note = 2'-O-methyluridine-3'-phosphate
  modified_base 11: mod_base = OTHER; note = 2'-O-methyluridine-3'-phosphate
  modified_base 12: mod_base = OTHER; note = 2'-O-methylcytidine-3'-phosphate
  modified_base 13: mod_base = OTHER; note = 2'-O-methyluridine-3'-phosphate
  modified_base 14: mod_base = OTHER; note = 2'-deoxy-2'-fluorocytidine-3'-phosphate
  modified_base 15: mod_base = OTHER; note = 2'-O-methyladenosine-3'-phosphate
  modified_base 16: mod_base = OTHER; note = 2'-deoxy-2'-fluoroadenosine-3'-phosphate
  modified_base 17: mod_base = OTHER; note = 2'-O-methyluridine-3'-phosphate
  modified_base 18: mod_base = OTHER; note = 2'-O-methylcytidine-3'-phosphate
  modified_base 19: mod_base = OTHER; note = 2'-O-methyladenosine-3'-phosphate
  modified_base 20: mod_base = OTHER; note = 2'-O-methylcytidine-3'-phosphate
  modified_base 21: mod_base = OTHER; note = 2'-O-methyladenosine-3'-phosphate
  modified_base 22: mod_base = OTHER; note = 2'-O-methylguanosine-3'-phosphate
  modified_base 23: mod_base = OTHER; note = 2'-O-methylguanosine
tacactttattctcaatcacagg

SEQ ID NO: 5212 - RNA, 23 nt, synthetic construct
  source 1..23: mol_type = other RNA
  modified_base 1: mod_base = OTHER; note = 2'-O-methyluridine-3'-phosphate 5'phosphate
  modified_base 2: mod_base = OTHER; note = 2'-deoxy-2'-fluorocytidine-3'-phosphate
  modified_base 3: mod_base = OTHER; note = 2'-O-methyladenosine-3'-phosphate
  modified_base 4: mod_base = OTHER; note = 2'-O-methylcytidine-3'-phosphate
  modified_base 5: mod_base = OTHER; note = 2'-O-methyladenosine-3'-phosphate
  modified_base 6: mod_base = OTHER; note = 2'-deoxy-2'-fluorocytidine-3'-phosphate
  modified_base 7: mod_base = OTHER; note = 2'-O-methyluridine-3'-phosphate
  modified_base 8: mod_base = OTHER; note = 2'-O-methyluridine-3'-phosphate
  modified_base 9: mod_base = OTHER; note = 2'-O-methyluridine-3'-phosphate
  modified_base 10: mod_base = OTHER; note = 2'-O-methyladenosine-3'-phosphate
  modified_base 11: mod_base = OTHER; note = 2'-O-methyluridine-3'-phosphate
  modified_base 12: mod_base = OTHER; note = 2'-O-methyluridine-3'-phosphate
  modified_base 13: mod_base = OTHER; note = 2'-O-methylcytidine-3'-phosphate
  modified_base 14: mod_base = OTHER; note = 2'-deoxy-2'-fluorouridine-3'-phosphate
  modified_base 15: mod_base = OTHER; note = 2'-O-methylcytidine-3'-phosphate
  modified_base 16: mod_base = OTHER; note = 2'-deoxy-2'-fluoroadenosine-3'-phosphate
  modified_base 17: mod_base = OTHER; note = 2'-O-methyladenosine-3'-phosphate
  modified_base 18: mod_base = OTHER; note = 2'-O-methyluridine-3'-phosphate
  modified_base 19: mod_base = OTHER; note = 2'-O-methylcytidine-3'-phosphate
  modified_base 20: mod_base = OTHER; note = 2'-O-methyladenosine-3'-phosphate
  modified_base 21: mod_base = OTHER; note = 2'-O-methylcytidine-3'-phosphate
  modified_base 22: mod_base = OTHER; note = 2'-O-methyladenosine-3'-phosphate
  modified_base 23: mod_base = OTHER; note = 2'-O-methylguanosine
tcacactttattctcaatcacag

SEQ ID NO: 5213 - RNA, 23 nt, synthetic construct
  source 1..23: mol_type = other RNA
  modified_base 1: mod_base = OTHER; note = 2'-O-methyluridine-3'-phosphate 5'phosphate
  modified_base 2: mod_base = OTHER; note = 2'-deoxy-2'-fluoroguanosine-3'-phosphate
  modified_base 3: mod_base = OTHER; note = 2'-O-methylcytidine-3'-phosphate
  modified_base 4: mod_base = OTHER; note = 2'-O-methyladenosine-3'-phosphate
  modified_base 5: mod_base = OTHER; note = 2'-O-methylcytidine-3'-phosphate
  modified_base 6: mod_base = OTHER; note = 2'-deoxy-2'-fluoroadenosine-3'-phosphate
  modified_base 7: mod_base = OTHER; note = 2'-O-methylcytidine-3'-phosphate
  modified_base 8: mod_base = OTHER; note = 2'-O-methyluridine-3'-phosphate
  modified_base 9: mod_base = OTHER; note = 2'-O-methyluridine-3'-phosphate
  modified_base 10: mod_base = OTHER; note = 2'-O-methyluridine-3'-phosphate
  modified_base 11: mod_base = OTHER; note = 2'-O-methyladenosine-3'-phosphate
  modified_base 12: mod_base = OTHER; note = 2'-O-methyluridine-3'-phosphate
  modified_base 13: mod_base = OTHER; note = 2'-O-methyluridine-3'-phosphate
  modified_base 14: mod_base = OTHER; note = 2'-deoxy-2'-fluorocytidine-3'-phosphate
  modified_base 15: mod_base = OTHER; note = 2'-O-methyluridine-3'-phosphate
  modified_base 16: mod_base = OTHER; note = 2'-deoxy-2'-fluorocytidine-3'-phosphate
  modified_base 17: mod_base = OTHER; note = 2'-O-methyladenosine-3'-phosphate
  modified_base 18: mod_base = OTHER; note = 2'-O-methyladenosine-3'-phosphate
  modified_base 19: mod_base = OTHER; note = 2'-O-methyluridine-3'-phosphate
  modified_base 20: mod_base = OTHER; note = 2'-O-methylcytidine-3'-phosphate
  modified_base 21: mod_base = OTHER; note = 2'-O-methyladenosine-3'-phosphate
  modified_base 22: mod_base = OTHER; note = 2'-O-methylcytidine-3'-phosphate
  modified_base 23: mod_base = OTHER; note = 2'-O-methyladenosine
tgcacactttattctcaatcaca

SEQ ID NO: 5214 - RNA, 23 nt, synthetic construct
  source 1..23: mol_type = other RNA
  modified_base 1: mod_base = OTHER; note = 2'-O-methyluridine-3'-phosphate 5'phosphate
  modified_base 2: mod_base = OTHER; note = 2'-deoxy-2'-fluorouridine-3'-phosphate
  modified_base 3: mod_base = OTHER; note = 2'-O-methylguanosine-3'-phosphate
  modified_base 4: mod_base = OTHER; note = 2'-O-methylcytidine-3'-phosphate
  modified_base 5: mod_base = OTHER; note = 2'-O-methyladenosine-3'-phosphate
  modified_base 6: mod_base = OTHER; note = 2'-deoxy-2'-fluorocytidine-3'-phosphate
  modified_base 7: mod_base = OTHER; note = 2'-O-methyladenosine-3'-phosphate
  modified_base 8: mod_base = OTHER; note = 2'-O-methylcytidine-3'-phosphate
  modified_base 9: mod_base = OTHER; note = 2'-O-methyluridine-3'-phosphate
  modified_base 10: mod_base = OTHER; note = 2'-O-methyluridine-3'-phosphate
  modified_base 11: mod_base = OTHER; note = 2'-O-methyluridine-3'-phosphate
  modified_base 12: mod_base = OTHER; note = 2'-O-methyladenosine-3'-phosphate
  modified_base 13: mod_base = OTHER; note = 2'-O-methyluridine-3'-phosphate
  modified_base 14: mod_base = OTHER; note = 2'-deoxy-2'-fluorouridine-3'-phosphate
  modified_base 15: mod_base = OTHER; note = 2'-O-methylcytidine-3'-phosphate
  modified_base 16: mod_base = OTHER; note = 2'-deoxy-2'-fluorouridine-3'-phosphate
  modified_base 17: mod_base = OTHER; note = 2'-O-methylcytidine-3'-phosphate
  modified_base 18: mod_base = OTHER; note = 2'-O-methyladenosine-3'-phosphate
  modified_base 19: mod_base = OTHER; note = 2'-O-methyladenosine-3'-phosphate
  modified_base 20: mod_base = OTHER; note = 2'-O-methyluridine-3'-phosphate
  modified_base 21: mod_base = OTHER; note = 2'-O-methylcytidine-3'-phosphate
  modified_base 22: mod_base = OTHER; note = 2'-O-methyladenosine-3'-phosphate
  modified_base 23: mod_base = OTHER; note = 2'-O-methylcytidine
ttgcacactttattctcaatcac

SEQ ID NO: 5215 - RNA, 23 nt, synthetic construct
  source 1..23: mol_type = other RNA
  modified_base 1: mod_base = OTHER; note = 2'-O-methyluridine-3'-phosphate 5'phosphate
  modified_base 2: mod_base = OTHER; note = 2'-deoxy-2'-fluorouridine-3'-phosphate
  modified_base 3: mod_base = OTHER; note = 2'-O-methyluridine-3'-phosphate
  modified_base 4: mod_base = OTHER; note = 2'-O-methylguanosine-3'-phosphate
  modified_base 5: mod_base = OTHER; note = 2'-O-methylcytidine-3'-phosphate
  modified_base 6: mod_base = OTHER; note = 2'-deoxy-2'-fluoroadenosine-3'-phosphate
  modified_base 7: mod_base = OTHER; note = 2'-O-methylcytidine-3'-phosphate
  modified_base 8: mod_base = OTHER; note = 2'-O-methyladenosine-3'-phosphate
  modified_base 9: mod_base = OTHER; note = 2'-O-methylcytidine-3'-phosphate
  modified_base 10: mod_base = OTHER; note = 2'-O-methyluridine-3'-phosphate
  modified_base 11: mod_base = OTHER; note = 2'-O-methyluridine-3'-phosphate
  modified_base 12: mod_base = OTHER; note = 2'-O-methyluridine-3'-phosphate
  modified_base 13: mod_base = OTHER; note = 2'-O-methyladenosine-3'-phosphate
  modified_base 14: mod_base = OTHER; note = 2'-deoxy-2'-fluorouridine-3'-phosphate
  modified_base 15: mod_base = OTHER; note = 2'-O-methyluridine-3'-phosphate
  modified_base 16: mod_base = OTHER; note = 2'-deoxy-2'-fluorocytidine-3'-phosphate
  modified_base 17: mod_base = OTHER; note = 2'-O-methyluridine-3'-phosphate
  modified_base 18: mod_base = OTHER; note = 2'-O-methylcytidine-3'-phosphate
  modified_base 19: mod_base = OTHER; note = 2'-O-methyladenosine-3'-phosphate
  modified_base 20: mod_base = OTHER; note = 2'-O-methyladenosine-3'-phosphate
  modified_base 21: mod_base = OTHER; note = 2'-O-methyluridine-3'-phosphate
  modified_base 22: mod_base = OTHER; note = 2'-O-methylcytidine-3'-phosphate
  modified_base 23: mod_base = OTHER; note = 2'-O-methyladenosine
tttgcacactttattctcaatca

SEQ ID NO: 5216 - RNA, 23 nt, synthetic construct
  source 1..23: mol_type = other RNA
  modified_base 1: mod_base = OTHER; note = 2'-O-methyluridine-3'-phosphate 5'phosphate
  modified_base 2: mod_base = OTHER; note = 2'-deoxy-2'-fluoroadenosine-3'-phosphate
  modified_base 3: mod_base = OTHER; note = 2'-O-methyluridine-3'-phosphate
  modified_base 4: mod_base = OTHER; note = 2'-O-methyluridine-3'-phosphate
  modified_base 5: mod_base = OTHER; note = 2'-O-methylguanosine-3'-phosphate
  modified_base 6: mod_base = OTHER; note = 2'-deoxy-2'-fluorocytidine-3'-phosphate
  modified_base 7: mod_base = OTHER; note = 2'-O-methyladenosine-3'-phosphate
  modified_base 8: mod_base = OTHER; note = 2'-O-methylcytidine-3'-phosphate
  modified_base 9: mod_base = OTHER; note = 2'-O-methyladenosine-3'-phosphate
  modified_base 10: mod_base = OTHER; note = 2'-O-methylcytidine-3'-phosphate
  modified_base 11: mod_base = OTHER; note = 2'-O-methyluridine-3'-phosphate
  modified_base 12: mod_base = OTHER; note = 2'-O-methyluridine-3'-phosphate
  modified_base 13: mod_base = OTHER; note = 2'-O-methyluridine-3'-phosphate
  modified_base 14: mod_base = OTHER; note = 2'-deoxy-2'-fluoroadenosine-3'-phosphate
  modified_base 15: mod_base = OTHER; note = 2'-O-methyluridine-3'-phosphate
  modified_base 16: mod_base = OTHER; note = 2'-deoxy-2'-fluorouridine-3'-phosphate
  modified_base 17: mod_base = OTHER; note = 2'-O-methylcytidine-3'-phosphate
  modified_base 18: mod_base = OTHER; note = 2'-O-methyluridine-3'-phosphate
  modified_base 19: mod_base = OTHER; note = 2'-O-methylcytidine-3'-phosphate
  modified_base 20: mod_base = OTHER; note = 2'-O-methyladenosine-3'-phosphate
  modified_base 21: mod_base = OTHER; note = 2'-O-methyladenosine-3'-phosphate
  modified_base 22: mod_base = OTHER; note = 2'-O-methyluridine-3'-phosphate
  modified_base 23: mod_base = OTHER; note = 2'-O-methylcytidine
tattgcacactttattctcaatc

SEQ ID NO: 5217 - RNA, 23 nt, synthetic construct
  source 1..23: mol_type = other RNA
  modified_base 1: mod_base = OTHER; note = 2'-O-methyluridine-3'-phosphate 5'phosphate
  modified_base 2: mod_base = OTHER; note = 2'-deoxy-2'-fluoroguanosine-3'-phosphate
  modified_base 3: mod_base = OTHER; note = 2'-O-methyladenosine-3'-phosphate
  modified_base 4: mod_base = OTHER; note = 2'-O-methyluridine-3'-phosphate
  modified_base 5: mod_base = OTHER; note = 2'-O-methyluridine-3'-phosphate
  modified_base 6: mod_base = OTHER; note = 2'-deoxy-2'-fluoroguanosine-3'-phosphate
  modified_base 7: mod_base = OTHER; note = 2'-O-methylcytidine-3'-phosphate
  modified_base 8: mod_base = OTHER; note = 2'-O-methyladenosine-3'-phosphate
  modified_base 9: mod_base = OTHER; note = 2'-O-methylcytidine-3'-phosphate
  modified_base 10: mod_base = OTHER; note = 2'-O-methyladenosine-3'-phosphate
  modified_base 11: mod_base = OTHER; note = 2'-O-methylcytidine-3'-phosphate
  modified_base 12: mod_base = OTHER; note = 2'-O-methyluridine-3'-phosphate
  modified_base 13: mod_base = OTHER; note = 2'-O-methyluridine-3'-phosphate
  modified_base 14: mod_base = OTHER; note = 2'-deoxy-2'-fluorouridine-3'-phosphate
  modified_base 15: mod_base = OTHER; note = 2'-O-methyladenosine-3'-phosphate
  modified_base 16: mod_base = OTHER; note = 2'-deoxy-2'-fluorouridine-3'-phosphate
  modified_base 17: mod_base = OTHER; note = 2'-O-methyluridine-3'-phosphate
  modified_base 18: mod_base = OTHER; note = 2'-O-methylcytidine-3'-phosphate
  modified_base 19: mod_base = OTHER; note = 2'-O-methyluridine-3'-phosphate
  modified_base 20: mod_base = OTHER; note = 2'-O-methylcytidine-3'-phosphate
  modified_base 21: mod_base = OTHER; note = 2'-O-methyladenosine-3'-phosphate
  modified_base 22: mod_base = OTHER; note = 2'-O-methyladenosine-3'-phosphate
  modified_base 23: mod_base = OTHER; note = 2'-O-methyluridine
tgattgcacactttattctcaat

SEQ ID NO: 5218 - RNA, 23 nt, synthetic construct
  source 1..23: mol_type = other RNA
  modified_base 1: mod_base = OTHER; note = 2'-O-methyluridine-3'-phosphate 5'phosphate
  modified_base 2: mod_base = OTHER; note = 2'-deoxy-2'-fluorocytidine-3'-phosphate
  modified_base 3: mod_base = OTHER; note = 2'-O-methylguanosine-3'-phosphate
  modified_base 4: mod_base = OTHER; note = 2'-O-methyladenosine-3'-phosphate
  modified_base 5: mod_base = OTHER; note = 2'-O-methyluridine-3'-phosphate
  modified_base 6: mod_base = OTHER; note = 2'-deoxy-2'-fluorouridine-3'-phosphate
  modified_base 7: mod_base = OTHER; note = 2'-O-methylguanosine-3'-phosphate
  modified_base 8: mod_base = OTHER; note = 2'-O-methylcytidine-3'-phosphate
  modified_base 9: mod_base = OTHER; note = 2'-O-methyladenosine-3'-phosphate
  modified_base 10: mod_base = OTHER; note = 2'-O-methylcytidine-3'-phosphate
  modified_base 11: mod_base = OTHER; note = 2'-O-methyladenosine-3'-phosphate
  modified_base 12: mod_base = OTHER; note = 2'-O-methylcytidine-3'-phosphate
  modified_base 13: mod_base = OTHER; note = 2'-O-methyluridine-3'-phosphate
  modified_base 14: mod_base = OTHER; note = 2'-deoxy-2'-fluorouridine-3'-phosphate
  modified_base 15: mod_base = OTHER; note = 2'-O-methyluridine-3'-phosphate
  modified_base 16: mod_base = OTHER; note = 2'-deoxy-2'-fluoroadenosine-3'-phosphate
  modified_base 17: mod_base = OTHER; note = 2'-O-methyluridine-3'-phosphate
  modified_base 18: mod_base = OTHER; note = 2'-O-methyluridine-3'-phosphate
  modified_base 19: mod_base = OTHER; note = 2'-O-methylcytidine-3'-phosphate
  modified_base 20: mod_base = OTHER; note = 2'-O-methyluridine-3'-phosphate
  modified_base 21: mod_base = OTHER; note = 2'-O-methylcytidine-3'-phosphate
  modified_base 22: mod_base = OTHER; note = 2'-O-methyladenosine-3'-phosphate
  modified_base 23: mod_base = OTHER; note = 2'-O-methyladenosine
tcgattgcacactttattctcaa

SEQ ID NO: 5219 - RNA, 23 nt, synthetic construct
  source 1..23: mol_type = other RNA
  modified_base 1: mod_base = OTHER; note = 2'-O-methyluridine-3'-phosphate 5'phosphate
  modified_base 2: mod_base = OTHER; note = 2'-deoxy-2'-fluoroadenosine-3'-phosphate
  modified_base 3: mod_base = OTHER; note = 2'-O-methylguanosine-3'-phosphate
  modified_base 4: mod_base = OTHER; note = 2'-O-methylcytidine-3'-phosphate
  modified_base 5: mod_base = OTHER; note = 2'-O-methylguanosine-3'-phosphate
  modified_base 6: mod_base = OTHER; note = 2'-deoxy-2'-fluoroadenosine-3'-phosphate
  modified_base 7: mod_base = OTHER; note = 2'-O-methyluridine-3'-phosphate
  modified_base 8: mod_base = OTHER; note = 2'-O-methyluridine-3'-phosphate
  modified_base 9: mod_base = OTHER; note = 2'-O-methylguanosine-3'-phosphate
  modified_base 10: mod_base = OTHER; note = 2'-O-methylcytidine-3'-phosphate
  modified_base 11: mod_base = OTHER; note = 2'-O-methyladenosine-3'-phosphate
  modified_base 12: mod_base = OTHER; note = 2'-O-methylcytidine-3'-phosphate
  modified_base 13: mod_base = OTHER; note = 2'-O-methyladenosine-3'-phosphate
  modified_base 14: mod_base = OTHER; note = 2'-deoxy-2'-fluorocytidine-3'-phosphate
  modified_base 15: mod_base = OTHER; note = 2'-O-methyluridine-3'-phosphate
  modified_base 16: mod_base = OTHER; note = 2'-deoxy-2'-fluorouridine-3'-phosphate
  modified_base 17: mod_base = OTHER; note = 2'-O-methyluridine-3'-phosphate
  modified_base 18: mod_base = OTHER; note = 2'-O-methyladenosine-3'-phosphate
  modified_base 19: mod_base = OTHER; note = 2'-O-methyluridine-3'-phosphate
  modified_base 20: mod_base = OTHER; note = 2'-O-methyluridine-3'-phosphate
  modified_base 21: mod_base = OTHER; note = 2'-O-methylcytidine-3'-phosphate
  modified_base 22: mod_base = OTHER; note = 2'-O-methyluridine-3'-phosphate
  modified_base 23: mod_base = OTHER; note = 2'-O-methylcytidine
tagcgattgcacactttattctc

SEQ ID NO: 5220 - RNA, 23 nt, synthetic construct
  source 1..23: mol_type = other RNA
  modified_base 1: mod_base = OTHER; note = 2'-O-methyluridine-3'-phosphate 5'phosphate
  modified_base 2: mod_base = OTHER; note = 2'-deoxy-2'-fluorouridine-3'-phosphate
  modified_base 3: mod_base = OTHER; note = 2'-O-methyladenosine-3'-phosphate
  modified_base 4: mod_base = OTHER; note = 2'-O-methylguanosine-3'-phosphate
  modified_base 5: mod_base = OTHER; note = 2'-O-methylcytidine-3'-phosphate
  modified_base 6: mod_base = OTHER; note = 2'-deoxy-2'-fluoroguanosine-3'-phosphate
  modified_base 7: mod_base = OTHER; note = 2'-O-methyladenosine-3'-phosphate
  modified_base 8: mod_base = OTHER; note = 2'-O-methyluridine-3'-phosphate
  modified_base 9: mod_base = OTHER; note = 2'-O-methyluridine-3'-phosphate
  modified_base 10: mod_base = OTHER; note = 2'-O-methylguanosine-3'-phosphate
  modified_base 11: mod_base = OTHER; note = 2'-O-methylcytidine-3'-phosphate
  modified_base 12: mod_base = OTHER; note = 2'-O-methyladenosine-3'-phosphate
  modified_base 13: mod_base = OTHER; note = 2'-O-methylcytidine-3'-phosphate
  modified_base 14: mod_base = OTHER; note = 2'-deoxy-2'-fluoroadenosine-3'-phosphate
  modified_base 15: mod_base = OTHER; note = 2'-O-methylcytidine-3'-phosphate
  modified_base 16: mod_base = OTHER; note = 2'-deoxy-2'-fluorouridine-3'-phosphate
  modified_base 17: mod_base = OTHER; note = 2'-O-methyluridine-3'-phosphate
  modified_base 18: mod_base = OTHER; note = 2'-O-methyluridine-3'-phosphate
  modified_base 19: mod_base = OTHER; note = 2'-O-methyladenosine-3'-phosphate
  modified_base 20: mod_base = OTHER; note = 2'-O-methyluridine-3'-phosphate
  modified_base 21: mod_base = OTHER; note = 2'-O-methyluridine-3'-phosphate
  modified_base 22: mod_base = OTHER; note = 2'-O-methylcytidine-3'-phosphate
  modified_base 23: mod_base = OTHER; note = 2'-O-methyluridine
ttagcgattgcacactttattct

SEQ ID NO: 5221 - RNA, 23 nt, synthetic construct
  source 1..23: mol_type = other RNA
  modified_base 1: mod_base = OTHER; note = 2'-O-methyluridine-3'-phosphate 5'phosphate
  modified_base 2: mod_base = OTHER; note = 2'-deoxy-2'-fluoroadenosine-3'-phosphate
  modified_base 3: mod_base = OTHER; note = 2'-O-methyluridine-3'-phosphate
  modified_base 4: mod_base = OTHER; note = 2'-O-methyladenosine-3'-phosphate
  modified_base 5: mod_base = OTHER; note = 2'-O-methylguanosine-3'-phosphate
  modified_base 6: mod_base = OTHER; note = 2'-deoxy-2'-fluorocytidine-3'-phosphate
  modified_base 7: mod_base = OTHER; note = 2'-O-methylguanosine-3'-phosphate
  modified_base 8: mod_base = OTHER; note = 2'-O-methyladenosine-3'-phosphate
  modified_base 9: mod_base = OTHER; note = 2'-O-methyluridine-3'-phosphate
  modified_base 10: mod_base = OTHER; note = 2'-O-methyluridine-3'-phosphate
  modified_base 11: mod_base = OTHER; note = 2'-O-methylguanosine-3'-phosphate
  modified_base 12: mod_base = OTHER; note = 2'-O-methylcytidine-3'-phosphate
  modified_base 13: mod_base = OTHER; note = 2'-O-methyladenosine-3'-phosphate
  modified_base 14: mod_base = OTHER; note = 2'-deoxy-2'-fluorocytidine-3'-phosphate
  modified_base 15: mod_base = OTHER; note = 2'-O-methyladenosine-3'-phosphate
  modified_base 16: mod_base = OTHER; note = 2'-deoxy-2'-fluorocytidine-3'-phosphate
  modified_base 17: mod_base = OTHER; note = 2'-O-methyluridine-3'-phosphate
  modified_base 18: mod_base = OTHER; note = 2'-O-methyluridine-3'-phosphate
  modified_base 19: mod_base = OTHER; note = 2'-O-methyluridine-3'-phosphate
  modified_base 20: mod_base = OTHER; note = 2'-O-methyladenosine-3'-phosphate
  modified_base 21: mod_base = OTHER; note = 2'-O-methyluridine-3'-phosphate
  modified_base 22: mod_base = OTHER; note = 2'-O-methyluridine-3'-phosphate
  modified_base 23: mod_base = OTHER; note = 2'-O-methylcytidine
tatagcgattgcacactttattc

SEQ ID NO: 5222 - RNA, 23 nt, synthetic construct
  source 1..23: mol_type = other RNA
  modified_base 1: mod_base = OTHER; note = 2'-O-methyluridine-3'-phosphate 5'phosphate
  modified_base 2: mod_base = OTHER; note = 2'-deoxy-2'-fluorocytidine-3'-phosphate
  modified_base 3: mod_base = OTHER; note = 2'-O-methyladenosine-3'-phosphate
  modified_base 4: mod_base = OTHER; note = 2'-O-methyluridine-3'-phosphate
  modified_base 5: mod_base = OTHER; note = 2'-O-methyladenosine-3'-phosphate
  modified_base 6: mod_base = OTHER; note = 2'-deoxy-2'-fluoroguanosine-3'-phosphate
  modified_base 7: mod_base = OTHER; note = 2'-O-methylcytidine-3'-phosphate
  modified_base 8: mod_base = OTHER; note = 2'-O-methylguanosine-3'-phosphate
  modified_base 9: mod_base = OTHER; note = 2'-O-methyladenosine-3'-phosphate
  modified_base 10: mod_base = OTHER; note = 2'-O-methyluridine-3'-phosphate
  modified_base 11: mod_base = OTHER; note = 2'-O-methyluridine-3'-phosphate
  modified_base 12: mod_base = OTHER; note = 2'-O-methylguanosine-3'-phosphate
  modified_base 13: mod_base = OTHER; note = 2'-O-methylcytidine-3'-phosphate
  modified_base 14: mod_base = OTHER; note = 2'-deoxy-2'-fluoroadenosine-3'-phosphate
  modified_base 15: mod_base = OTHER; note = 2'-O-methylcytidine-3'-phosphate
  modified_base 16: mod_base = OTHER; note = 2'-deoxy-2'-fluoroadenosine-3'-phosphate
  modified_base 17: mod_base = OTHER; note = 2'-O-methylcytidine-3'-phosphate
  modified_base 18: mod_base = OTHER; note = 2'-O-methyluridine-3'-phosphate
  modified_base 19: mod_base = OTHER; note = 2'-O-methyluridine-3'-phosphate
  modified_base 20: mod_base = OTHER; note = 2'-O-methyluridine-3'-phosphate
  modified_base 21: mod_base = OTHER; note = 2'-O-methyladenosine-3'-phosphate
  modified_base 22: mod_base = OTHER; note = 2'-O-methyluridine-3'-phosphate
  modified_base 23: mod_base = OTHER; note = 2'-O-methyluridine
tcatagcgattgcacactttatt

SEQ ID NO: 5223 - RNA, 23 nt, synthetic construct
  source 1..23: mol_type = other RNA
  modified_base 1: mod_base = OTHER; note = 2'-O-methyluridine-3'-phosphate 5'phosphate
  modified_base 2: mod_base = OTHER; note = 2'-deoxy-2'-fluorouridine-3'-phosphate
  modified_base 3: mod_base = OTHER; note = 2'-O-methylcytidine-3'-phosphate
  modified_base 4: mod_base = OTHER; note = 2'-O-methyladenosine-3'-phosphate
  modified_base 5: mod_base = OTHER; note = 2'-O-methyluridine-3'-phosphate
  modified_base 6: mod_base = OTHER; note = 2'-deoxy-2'-fluoroadenosine-3'-phosphate
  modified_base 7: mod_base = OTHER; note = 2'-O-methylguanosine-3'-phosphate
  modified_base 8: mod_base = OTHER; note = 2'-O-methylcytidine-3'-phosphate
  modified_base 9: mod_base = OTHER; note = 2'-O-methylguanosine-3'-phosphate
  modified_base 10: mod_base = OTHER; note = 2'-O-methyladenosine-3'-phosphate
  modified_base 11: mod_base = OTHER; note = 2'-O-methyluridine-3'-phosphate
  modified_base 12: mod_base = OTHER; note = 2'-O-methyluridine-3'-phosphate
  modified_base 13: mod_base = OTHER; note = 2'-O-methylguanosine-3'-phosphate
  modified_base 14: mod_base = OTHER; note = 2'-deoxy-2'-fluorocytidine-3'-phosphate
  modified_base 15: mod_base = OTHER; note = 2'-O-methyladenosine-3'-phosphate
  modified_base 16: mod_base = OTHER; note = 2'-deoxy-2'-fluorocytidine-3'-phosphate
  modified_base 17: mod_base = OTHER; note = 2'-O-methyladenosine-3'-phosphate
  modified_base 18: mod_base = OTHER; note = 2'-O-methylcytidine-3'-phosphate
  modified_base 19: mod_base = OTHER; note = 2'-O-methyluridine-3'-phosphate
  modified_base 20: mod_base = OTHER; note = 2'-O-methyluridine-3'-phosphate
  modified_base 21: mod_base = OTHER; note = 2'-O-methyluridine-3'-phosphate
  modified_base 22: mod_base = OTHER; note = 2'-O-methyladenosine-3'-phosphate
  modified_base 23: mod_base = OTHER; note = 2'-O-methyluridine
ttcatagcgattgcacactttat

SEQ ID NO: 5224 - RNA, 23 nt, synthetic construct
  source 1..23: mol_type = other RNA
  modified_base 1: mod_base = OTHER; note = 2'-O-methyluridine-3'-phosphate 5'phosphate
  modified_base 2: mod_base = OTHER; note = 2'-deoxy-2'-fluorocytidine-3'-phosphate
  modified_base 3: mod_base = OTHER; note = 2'-O-methyluridine-3'-phosphate
  modified_base 4: mod_base = OTHER; note = 2'-O-methylcytidine-3'-phosphate
  modified_base 5: mod_base = OTHER; note = 2'-O-methyladenosine-3'-phosphate
  modified_base 6: mod_base = OTHER; note = 2'-deoxy-2'-fluorouridine-3'-phosphate
  modified_base 7: mod_base = OTHER; note = 2'-O-methyladenosine-3'-phosphate
  modified_base 8: mod_base = OTHER; note = 2'-O-methylguanosine-3'-phosphate
  modified_base 9: mod_base = OTHER; note = 2'-O-methylcytidine-3'-phosphate
  modified_base 10: mod_base = OTHER; note = 2'-O-methylguanosine-3'-phosphate
  modified_base 11: mod_base = OTHER; note = 2'-O-methyladenosine-3'-phosphate
  modified_base 12: mod_base = OTHER; note = 2'-O-methyluridine-3'-phosphate
  modified_base 13: mod_base = OTHER; note = 2'-O-methyluridine-3'-phosphate
  modified_base 14: mod_base = OTHER; note = 2'-deoxy-2'-fluoroguanosine-3'-phosphate
  modified_base 15: mod_base = OTHER; note = 2'-O-methylcytidine-3'-phosphate
  modified_base 16: mod_base = OTHER; note = 2'-deoxy-2'-fluoroadenosine-3'-phosphate
  modified_base 17: mod_base = OTHER; note = 2'-O-methylcytidine-3'-phosphate
  modified_base 18: mod_base = OTHER; note = 2'-O-methyladenosine-3'-phosphate
  modified_base 19: mod_base = OTHER; note = 2'-O-methylcytidine-3'-phosphate
  modified_base 20: mod_base = OTHER; note = 2'-O-methyluridine-3'-phosphate
  modified_base 21: mod_base = OTHER; note = 2'-O-methyluridine-3'-phosphate
  modified_base 22: mod_base = OTHER; note = 2'-O-methyluridine-3'-phosphate
  modified_base 23: mod_base = OTHER; note = 2'-O-methyladenosine
tctcatagcgattgcacacttta

SEQ ID NO: 5225 - RNA, 23 nt, synthetic construct
  source 1..23: mol_type = other RNA
  modified_base 1: mod_base = OTHER; note = 2'-O-methyluridine-3'-phosphate 5'phosphate
  modified_base 2: mod_base = OTHER; note = 2'-deoxy-2'-fluoroadenosine-3'-phosphate
  modified_base 3: mod_base = OTHER; note = 2'-O-methylcytidine-3'-phosphate
  modified_base 4: mod_base = OTHER; note = 2'-O-methyluridine-3'-phosphate
  modified_base 5: mod_base = OTHER; note = 2'-O-methylcytidine-3'-phosphate
  modified_base 6: mod_base = OTHER; note = 2'-deoxy-2'-fluoroadenosine-3'-phosphate
  modified_base 7: mod_base = OTHER; note = 2'-O-methyluridine-3'-phosphate
  modified_base 8: mod_base = OTHER; note = 2'-O-methyladenosine-3'-phosphate
  modified_base 9: mod_base = OTHER; note = 2'-O-methylguanosine-3'-phosphate
  modified_base 10: mod_base = OTHER; note = 2'-O-methylcytidine-3'-phosphate
  modified_base 11: mod_base = OTHER; note = 2'-O-methylguanosine-3'-phosphate
  modified_base 12: mod_base = OTHER; note = 2'-O-methyladenosine-3'-phosphate
  modified_base 13: mod_base = OTHER; note = 2'-O-methyluridine-3'-phosphate
  modified_base 14: mod_base = OTHER; note = 2'-deoxy-2'-fluorouridine-3'-phosphate
  modified_base 15: mod_base = OTHER; note = 2'-O-methylguanosine-3'-phosphate
  modified_base 16: mod_base = OTHER; note = 2'-deoxy-2'-fluorocytidine-3'-phosphate
  modified_base 17: mod_base = OTHER; note = 2'-O-methyladenosine-3'-phosphate
  modified_base 18: mod_base = OTHER; note = 2'-O-methylcytidine-3'-phosphate
  modified_base 19: mod_base = OTHER; note = 2'-O-methyladenosine-3'-phosphate
  modified_base 20: mod_base = OTHER; note = 2'-O-methylcytidine-3'-phosphate
  modified_base 21: mod_base = OTHER; note = 2'-O-methyluridine-3'-phosphate
  modified_base 22: mod_base = OTHER; note = 2'-O-methyluridine-3'-phosphate
  modified_base 23: mod_base = OTHER; note = 2'-O-methyluridine
tactcatagcgattgcacacttt

SEQ ID NO: 5226 - RNA, 23 nt, synthetic construct
  source 1..23: mol_type = other RNA
  modified_base 1: mod_base = OTHER; note = 2'-O-methyluridine-3'-phosphate 5'phosphate
  modified_base 2: mod_base = OTHER; note = 2'-deoxy-2'-fluoroadenosine-3'-phosphate
  modified_base 3: mod_base = OTHER; note = 2'-O-methyladenosine-3'-phosphate
  modified_base 4: mod_base = OTHER; note = 2'-O-methylcytidine-3'-phosphate
  modified_base 5: mod_base = OTHER; note = 2'-O-methyluridine-3'-phosphate
  modified_base 6: mod_base = OTHER; note = 2'-deoxy-2'-fluorocytidine-3'-phosphate
  modified_base 7: mod_base = OTHER; note = 2'-O-methyladenosine-3'-phosphate
  modified_base 8: mod_base = OTHER; note = 2'-O-methyluridine-3'-phosphate
  modified_base 9: mod_base = OTHER; note = 2'-O-methyladenosine-3'-phosphate
  modified_base 10: mod_base = OTHER; note = 2'-O-methylguanosine-3'-phosphate
  modified_base 11: mod_base = OTHER; note = 2'-O-methylcytidine-3'-phosphate
  modified_base 12: mod_base = OTHER; note = 2'-O-methylguanosine-3'-phosphate
  modified_base 13: mod_base = OTHER; note = 2'-O-methyladenosine-3'-phosphate
  modified_base 14: mod_base = OTHER; note = 2'-deoxy-2'-fluorouridine-3'-phosphate
  modified_base 15: mod_base = OTHER; note = 2'-O-methyluridine-3'-phosphate
  modified_base 16: mod_base = OTHER; note = 2'-deoxy-2'-fluoroguanosine-3'-phosphate
  modified_base 17: mod_base = OTHER; note = 2'-O-methylcytidine-3'-phosphate
  modified_base 18: mod_base = OTHER; note = 2'-O-methyladenosine-3'-phosphate
  modified_base 19: mod_base = OTHER; note = 2'-O-methylcytidine-3'-phosphate
  modified_base 20: mod_base = OTHER; note = 2'-O-methyladenosine-3'-phosphate
  modified_base 21: mod_base = OTHER; note = 2'-O-methylcytidine-3'-phosphate
  modified_base 22: mod_base = OTHER; note = 2'-O-methyluridine-3'-phosphate
  modified_base 23: mod_base = OTHER; note = 2'-O-methyluridine
taactcatagcgattgcacactt

SEQ ID NO: 5227 - RNA, 23 nt, synthetic construct
  source 1..23: mol_type = other RNA
  modified_base 1: mod_base = OTHER; note = 2'-O-methyluridine-3'-phosphate 5'phosphate
  modified_base 2: mod_base = OTHER; note = 2'-deoxy-2'-fluoroadenosine-3'-phosphate
  modified_base 3: mod_base = OTHER; note = 2'-O-methyladenosine-3'-phosphate
  modified_base 4: mod_base = OTHER; note = 2'-O-methyladenosine-3'-phosphate
  modified_base 5: mod_base = OTHER; note = 2'-O-methylcytidine-3'-phosphate
  modified_base 6: mod_base = OTHER; note = 2'-deoxy-2'-fluorouridine-3'-phosphate
  modified_base 7: mod_base = OTHER; note = 2'-O-methylcytidine-3'-phosphate
  modified_base 8: mod_base = OTHER; note = 2'-O-methyladenosine-3'-phosphate
  modified_base 9: mod_base = OTHER; note = 2'-O-methyluridine-3'-phosphate
  modified_base 10: mod_base = OTHER; note = 2'-O-methyladenosine-3'-phosphate
  modified_base 11: mod_base = OTHER; note = 2'-O-methylguanosine-3'-phosphate
  modified_base 12: mod_base = OTHER; note = 2'-O-methylcytidine-3'-phosphate
  modified_base 13: mod_base = OTHER; note = 2'-O-methylguanosine-3'-phosphate
  modified_base 14: mod_base = OTHER; note = 2'-deoxy-2'-fluoroadenosine-3'-phosphate
  modified_base 15: mod_base = OTHER; note = 2'-O-methyluridine-3'-phosphate
  modified_base 16: mod_base = OTHER; note = 2'-deoxy-2'-fluorouridine-3'-phosphate
  modified_base 17: mod_base = OTHER; note = 2'-O-methylguanosine-3'-phosphate
  modified_base 18: mod_base = OTHER; note = 2'-O-methylcytidine-3'-phosphate
  modified_base 19: mod_base = OTHER; note = 2'-O-methyladenosine-3'-phosphate
  modified_base 20: mod_base = OTHER; note = 2'-O-methylcytidine-3'-phosphate
  modified_base 21: mod_base = OTHER; note = 2'-O-methyladenosine-3'-phosphate
  modified_base 22: mod_base = OTHER; note = 2'-O-methylcytidine-3'-phosphate
  modified_base 23: mod_base = OTHER; note = 2'-O-methyluridine
taaactcatagcgattgcacact

SEQ ID NO: 5228 - RNA, 23 nt, synthetic construct
  source 1..23: mol_type = other RNA
  modified_base 1: mod_base = OTHER; note = 2'-O-methyluridine-3'-phosphate 5'phosphate
  modified_base 2: mod_base = OTHER; note = 2'-deoxy-2'-fluoroguanosine-3'-phosphate
  modified_base 3: mod_base = OTHER; note = 2'-O-methyladenosine-3'-phosphate
  modified_base 4: mod_base = OTHER; note = 2'-O-methyladenosine-3'-phosphate
  modified_base 5: mod_base = OTHER; note = 2'-O-methyladenosine-3'-phosphate
  modified_base 6: mod_base = OTHER; note = 2'-deoxy-2'-fluorocytidine-3'-phosphate
  modified_base 7: mod_base = OTHER; note = 2'-O-methyluridine-3'-phosphate
  modified_base 8: mod_base = OTHER; note = 2'-O-methylcytidine-3'-phosphate
  modified_base 9: mod_base = OTHER; note = 2'-O-methyladenosine-3'-phosphate
  modified_base 10: mod_base = OTHER; note = 2'-O-methyluridine-3'-phosphate
  modified_base 11: mod_base = OTHER; note = 2'-O-methyladenosine-3'-phosphate
  modified_base 12: mod_base = OTHER; note = 2'-O-methylguanosine-3'-phosphate
  modified_base 13: mod_base = OTHER; note = 2'-O-methylcytidine-3'-phosphate
  modified_base 14: mod_base = OTHER; note = 2'-deoxy-2'-fluoroguanosine-3'-phosphate
  modified_base 15: mod_base = OTHER; note = 2'-O-methyladenosine-3'-phosphate
  modified_base 16: mod_base = OTHER; note = 2'-deoxy-2'-fluorouridine-3'-phosphate
  modified_base 17: mod_base = OTHER; note = 2'-O-methyluridine-3'-phosphate
  modified_base 18: mod_base = OTHER; note = 2'-O-methylguanosine-3'-phosphate
  modified_base 19: mod_base = OTHER; note = 2'-O-methylcytidine-3'-phosphate
  modified_base 20: mod_base = OTHER; note = 2'-O-methyladenosine-3'-phosphate
  modified_base 21: mod_base = OTHER; note = 2'-O-methylcytidine-3'-phosphate
  modified_base 22: mod_base = OTHER; note = 2'-O-methyladenosine-3'-phosphate
  modified_base 23: mod_base = OTHER; note = 2'-O-methylcytidine
tgaaactcatagcgattgcacac

SEQ ID NO: 5229 - RNA, 23 nt, synthetic construct
  source 1..23: mol_type = other RNA
  modified_base 1: mod_base = OTHER; note = 2'-O-methyluridine-3'-phosphate 5'phosphate
  modified_base 2: mod_base = OTHER; note = 2'-deoxy-2'-fluoroadenosine-3'-phosphate
  modified_base 3: mod_base = OTHER; note = 2'-O-methylguanosine-3'-phosphate
  modified_base 4: mod_base = OTHER; note = 2'-O-methyladenosine-3'-phosphate
  modified_base 5: mod_base = OTHER; note = 2'-O-methyladenosine-3'-phosphate
  modified_base 6: mod_base = OTHER; note = 2'-deoxy-2'-fluoroadenosine-3'-phosphate
  modified_base 7: mod_base = OTHER; note = 2'-O-methylcytidine-3'-phosphate
  modified_base 8: mod_base = OTHER; note = 2'-O-methyluridine-3'-phosphate
  modified_base 9: mod_base = OTHER; note = 2'-O-methylcytidine-3'-phosphate
  modified_base 10: mod_base = OTHER; note = 2'-O-methyladenosine-3'-phosphate
  modified_base 11: mod_base = OTHER; note = 2'-O-methyluridine-3'-phosphate
  modified_base 12: mod_base = OTHER; note = 2'-O-methyladenosine-3'-phosphate
  modified_base 13: mod_base = OTHER; note = 2'-O-methylguanosine-3'-phosphate
  modified_base 14: mod_base = OTHER; note = 2'-deoxy-2'-fluorocytidine-3'-phosphate
  modified_base 15: mod_base = OTHER; note = 2'-O-methylguanosine-3'-phosphate
  modified_base 16: mod_base = OTHER; note = 2'-deoxy-2'-fluoroadenosine-3'-phosphate
  modified_base 17: mod_base = OTHER; note = 2'-O-methyluridine-3'-phosphate
  modified_base 18: mod_base = OTHER; note = 2'-O-methyluridine-3'-phosphate
  modified_base 19: mod_base = OTHER; note = 2'-O-methylguanosine-3'-phosphate
  modified_base 20: mod_base = OTHER; note = 2'-O-methylcytidine-3'-phosphate
  modified_base 21: mod_base = OTHER; note = 2'-O-methyladenosine-3'-phosphate
  modified_base 22: mod_base = OTHER; note = 2'-O-methylcytidine-3'-phosphate
  modified_base 23: mod_base = OTHER; note = 2'-O-methyladenosine
tagaaactcatagcgattgcaca

SEQ ID NO: 5230 - RNA, 23 nt, synthetic construct
  source 1..23: mol_type = other RNA
  modified_base 1: mod_base = OTHER; note = 2'-O-methyluridine-3'-phosphate 5'phosphate
  modified_base 2: mod_base = OTHER; note = 2'-deoxy-2'-fluorouridine-3'-phosphate
  modified_base 3: mod_base = OTHER; note = 2'-O-methylcytidine-3'-phosphate
  modified_base 4: mod_base = OTHER; note = 2'-O-methyladenosine-3'-phosphate
  modified_base 5: mod_base = OTHER; note = 2'-O-methylguanosine-3'-phosphate
  modified_base 6: mod_base = OTHER; note = 2'-deoxy-2'-fluoroadenosine-3'-phosphate
  modified_base 7: mod_base = OTHER; note = 2'-O-methyladenosine-3'-phosphate
  modified_base 8: mod_base = OTHER; note = 2'-O-methyladenosine-3'-phosphate
  modified_base 9: mod_base = OTHER; note = 2'-O-methylcytidine-3'-phosphate
  modified_base 10: mod_base = OTHER; note = 2'-O-methyluridine-3'-phosphate
  modified_base 11: mod_base = OTHER; note = 2'-O-methylcytidine-3'-phosphate
  modified_base 12: mod_base = OTHER; note = 2'-O-methyladenosine-3'-phosphate
  modified_base 13: mod_base = OTHER; note = 2'-O-methyluridine-3'-phosphate
  modified_base 14: mod_base = OTHER; note = 2'-deoxy-2'-fluoroadenosine-3'-phosphate
  modified_base 15: mod_base = OTHER; note = 2'-O-methylguanosine-3'-phosphate
  modified_base 16: mod_base = OTHER; note = 2'-deoxy-2'-fluorocytidine-3'-phosphate
  modified_base 17: mod_base = OTHER; note = 2'-O-methylguanosine-3'-phosphate
  modified_base 18: mod_base = OTHER; note = 2'-O-methyladenosine-3'-phosphate
  modified_base 19: mod_base = OTHER; note = 2'-O-methyluridine-3'-phosphate
  modified_base 20: mod_base = OTHER; note = 2'-O-methyluridine-3'-phosphate
  modified_base 21: mod_base = OTHER; note = 2'-O-methylguanosine-3'-phosphate
  modified_base 22: mod_base = OTHER; note = 2'-O-methylcytidine-3'-phosphate
  modified_base 23: mod_base = OTHER; note = 2'-O-methyladenosine
ttcagaaactcatagcgattgca

SEQ ID NO: 5231 - RNA, 23 nt, synthetic construct
  source 1..23: mol_type = other RNA
  modified_base 1: mod_base = OTHER; note = 2'-O-methyluridine-3'-phosphate 5'phosphate
  modified_base 2: mod_base = OTHER; note = 2'-deoxy-2'-fluorouridine-3'-phosphate
  modified_base 3: mod_base = OTHER; note = 2'-O-methyluridine-3'-phosphate
  modified_base 4: mod_base = OTHER; note = 2'-O-methylcytidine-3'-phosphate
  modified_base 5: mod_base = OTHER; note = 2'-O-methyladenosine-3'-phosphate
  modified_base 6: mod_base = OTHER; note = 2'-deoxy-2'-fluoroguanosine-3'-phosphate
  modified_base 7: mod_base = OTHER; note = 2'-O-methyladenosine-3'-phosphate
  modified_base 8: mod_base = OTHER; note = 2'-O-methyladenosine-3'-phosphate
  modified_base 9: mod_base = OTHER; note = 2'-O-methyladenosine-3'-phosphate
  modified_base 10: mod_base = OTHER; note = 2'-O-methylcytidine-3'-phosphate
  modified_base 11: mod_base = OTHER; note = 2'-O-methyluridine-3'-phosphate
  modified_base 12: mod_base = OTHER; note = 2'-O-methylcytidine-3'-phosphate
  modified_base 13: mod_base = OTHER; note = 2'-O-methyladenosine-3'-phosphate
  modified_base 14: mod_base = OTHER; note = 2'-deoxy-2'-fluorouridine-3'-phosphate
  modified_base 15: mod_base = OTHER; note = 2'-O-methyladenosine-3'-phosphate
  modified_base 16: mod_base = OTHER; note = 2'-deoxy-2'-fluoroguanosine-3'-phosphate
  modified_base 17: mod_base = OTHER; note = 2'-O-methylcytidine-3'-phosphate
  modified_base 18: mod_base = OTHER; note = 2'-O-methylguanosine-3'-phosphate
  modified_base 19: mod_base = OTHER; note = 2'-O-methyladenosine-3'-phosphate
  modified_base 20: mod_base = OTHER; note = 2'-O-methyluridine-3'-phosphate
  modified_base 21: mod_base = OTHER; note = 2'-O-methyluridine-3'-phosphate
  modified_base 22: mod_base = OTHER; note = 2'-O-methylguanosine-3'-phosphate
  modified_base 23: mod_base = OTHER; note = 2'-O-methylcytidine
tttcagaaactcatagcgattgc

SEQ ID NO: 5232 - RNA, 23 nt, synthetic construct
  source 1..23: mol_type = other RNA
  modified_base 1: mod_base = OTHER; note = 2'-O-methyluridine-3'-phosphate 5'phosphate
  modified_base 2: mod_base = OTHER; note = 2'-deoxy-2'-fluoroadenosine-3'-phosphate
  modified_base 3: mod_base = OTHER; note = 2'-O-methyluridine-3'-phosphate
  modified_base 4: mod_base = OTHER; note = 2'-O-methyluridine-3'-phosphate
  modified_base 5: mod_base = OTHER; note = 2'-O-methylcytidine-3'-phosphate
  modified_base 6: mod_base = OTHER; note = 2'-deoxy-2'-fluoroadenosine-3'-phosphate
  modified_base 7: mod_base = OTHER; note = 2'-O-methylguanosine-3'-phosphate
  modified_base 8: mod_base = OTHER; note = 2'-O-methyladenosine-3'-phosphate
  modified_base 9: mod_base = OTHER; note = 2'-O-methyladenosine-3'-phosphate
  modified_base 10: mod_base = OTHER; note = 2'-O-methyladenosine-3'-phosphate
  modified_base 11: mod_base = OTHER; note = 2'-O-methylcytidine-3'-phosphate
  modified_base 12: mod_base = OTHER; note = 2'-O-methyluridine-3'-phosphate
  modified_base 13: mod_base = OTHER; note = 2'-O-methylcytidine-3'-phosphate
  modified_base 14: mod_base = OTHER; note = 2'-deoxy-2'-fluoroadenosine-3'-phosphate
  modified_base 15: mod_base = OTHER; note = 2'-O-methyluridine-3'-phosphate
  modified_base 16: mod_base = OTHER; note = 2'-deoxy-2'-fluoroadenosine-3'-phosphate
  modified_base 17: mod_base = OTHER; note = 2'-O-methylguanosine-3'-phosphate
  modified_base 18: mod_base = OTHER; note = 2'-O-methylcytidine-3'-phosphate
  modified_base 19: mod_base = OTHER; note = 2'-O-methylguanosine-3'-phosphate
  modified_base 20: mod_base = OTHER; note = 2'-O-methyladenosine-3'-phosphate
  modified_base 21: mod_base = OTHER; note = 2'-O-methyluridine-3'-phosphate
  modified_base 22: mod_base = OTHER; note = 2'-O-methyluridine-3'-phosphate
  modified_base 23: mod_base = OTHER; note = 2'-O-methylguanosine
tattcagaaactcatagcgattg

SEQ ID NO: 5233 - RNA, 23 nt, synthetic construct
  source 1..23: mol_type = other RNA
  modified_base 1: mod_base = OTHER; note = 2'-O-methyluridine-3'-phosphate 5'phosphate
  modified_base 2: mod_base = OTHER; note = 2'-deoxy-2'-fluorocytidine-3'-phosphate
  modified_base 3: mod_base = OTHER; note = 2'-O-methyladenosine-3'-phosphate
  modified_base 4: mod_base = OTHER; note = 2'-O-methyluridine-3'-phosphate
  modified_base 5: mod_base = OTHER; note = 2'-O-methyluridine-3'-phosphate
  modified_base 6: mod_base = OTHER; note = 2'-deoxy-2'-fluorocytidine-3'-phosphate
  modified_base 7: mod_base = OTHER; note = 2'-O-methyladenosine-3'-phosphate
  modified_base 8: mod_base = OTHER; note = 2'-O-methylguanosine-3'-phosphate
  modified_base 9: mod_base = OTHER; note = 2'-O-methyladenosine-3'-phosphate
  modified_base 10: mod_base = OTHER; note = 2'-O-methyladenosine-3'-phosphate
  modified_base 11: mod_base = OTHER; note = 2'-O-methyladenosine-3'-phosphate
  modified_base 12: mod_base = OTHER; note = 2'-O-methylcytidine-3'-phosphate
  modified_base 13: mod_base = OTHER; note = 2'-O-methyluridine-3'-phosphate
  modified_base 14: mod_base = OTHER; note = 2'-deoxy-2'-fluorocytidine-3'-phosphate
  modified_base 15: mod_base = OTHER; note = 2'-O-methyladenosine-3'-phosphate
  modified_base 16: mod_base = OTHER; note = 2'-deoxy-2'-fluorouridine-3'-phosphate
  modified_base 17: mod_base = OTHER; note = 2'-O-methyladenosine-3'-phosphate
  modified_base 18: mod_base = OTHER; note = 2'-O-methylguanosine-3'-phosphate
  modified_base 19: mod_base = OTHER; note = 2'-O-methylcytidine-3'-phosphate
  modified_base 20: mod_base = OTHER; note = 2'-O-methylguanosine-3'-phosphate
  modified_base 21: mod_base = OTHER; note = 2'-O-methyladenosine-3'-phosphate
  modified_base 22: mod_base = OTHER; note = 2'-O-methyluridine-3'-phosphate
  modified_base 23: mod_base = OTHER; note = 2'-O-methyluridine
tcattcagaaactcatagcgatt

SEQ ID NO: 5234 - RNA, 23 nt, synthetic construct
  source 1..23: mol_type = other RNA
  modified_base 1: mod_base = OTHER; note = 2'-O-methyluridine-3'-phosphate 5'phosphate
  modified_base 2: mod_base = OTHER; note = 2'-deoxy-2'-fluorocytidine-3'-phosphate
  modified_base 3: mod_base = OTHER; note = 2'-O-methylcytidine-3'-phosphate
  modified_base 4: mod_base = OTHER; note = 2'-O-methyladenosine-3'-phosphate
  modified_base 5: mod_base = OTHER; note = 2'-O-methyluridine-3'-phosphate
  modified_base 6: mod_base = OTHER; note = 2'-deoxy-2'-fluorouridine-3'-phosphate
  modified_base 7: mod_base = OTHER; note = 2'-O-methylcytidine-3'-phosphate
  modified_base 8: mod_base = OTHER; note = 2'-O-methyladenosine-3'-phosphate
  modified_base 9: mod_base = OTHER; note = 2'-O-methylguanosine-3'-phosphate
  modified_base 10: mod_base = OTHER; note = 2'-O-methyladenosine-3'-phosphate
  modified_base 11: mod_base = OTHER; note = 2'-O-methyladenosine-3'-phosphate
  modified_base 12: mod_base = OTHER; note = 2'-O-methyladenosine-3'-phosphate
  modified_base 13: mod_base = OTHER; note = 2'-O-methylcytidine-3'-phosphate
  modified_base 14: mod_base = OTHER; note = 2'-deoxy-2'-fluorouridine-3'-phosphate
  modified_base 15: mod_base = OTHER; note = 2'-O-methylcytidine-3'-phosphate
  modified_base 16: mod_base = OTHER; note = 2'-deoxy-2'-fluoroadenosine-3'-phosphate
  modified_base 17: mod_base = OTHER; note = 2'-O-methyluridine-3'-phosphate
  modified_base 18: mod_base = OTHER; note = 2'-O-methyladenosine-3'-phosphate
  modified_base 19: mod_base = OTHER; note = 2'-O-methylguanosine-3'-phosphate
  modified_base 20: mod_base = OTHER; note = 2'-O-methylcytidine-3'-phosphate
  modified_base 21: mod_base = OTHER; note = 2'-O-methylguanosine-3'-phosphate
  modified_base 22: mod_base = OTHER; note = 2'-O-methyladenosine-3'-phosphate
  modified_base 23: mod_base = OTHER; note = 2'-O-methyluridine
tccattcagaaactcatagcgat

SEQ ID NO: 5235 - RNA, 23 nt, synthetic construct
  source 1..23: mol_type = other RNA
  modified_base 1: mod_base = OTHER; note = 2'-O-methyluridine-3'-phosphate 5'phosphate
  modified_base 2: mod_base = OTHER; note = 2'-deoxy-2'-fluorouridine-3'-phosphate
  modified_base 3: mod_base = OTHER; note = 2'-O-methylcytidine-3'-phosphate
  modified_base 4: mod_base = OTHER; note = 2'-O-methylcytidine-3'-phosphate
  modified_base 5: mod_base = OTHER; note = 2'-O-methyladenosine-3'-phosphate
  modified_base 6: mod_base = OTHER; note = 2'-deoxy-2'-fluorouridine-3'-phosphate
  modified_base 7: mod_base = OTHER; note = 2'-O-methyluridine-3'-phosphate
  modified_base 8: mod_base = OTHER; note = 2'-O-methylcytidine-3'-phosphate
  modified_base 9: mod_base = OTHER; note = 2'-O-methyladenosine-3'-phosphate
  modified_base 10: mod_base = OTHER; note = 2'-O-methylguanosine-3'-phosphate
  modified_base 11: mod_base = OTHER; note = 2'-O-methyladenosine-3'-phosphate
  modified_base 12: mod_base = OTHER; note = 2'-O-methyladenosine-3'-phosphate
  modified_base 13: mod_base = OTHER; note = 2'-O-methyladenosine-3'-phosphate
  modified_base 14: mod_base = OTHER; note = 2'-deoxy-2'-fluorocytidine-3'-phosphate
  modified_base 15: mod_base = OTHER; note = 2'-O-methyluridine-3'-phosphate
  modified_base 16: mod_base = OTHER; note = 2'-deoxy-2'-fluorocytidine-3'-phosphate
  modified_base 17: mod_base = OTHER; note = 2'-O-methyladenosine-3'-phosphate
  modified_base 18: mod_base = OTHER; note = 2'-O-methyluridine-3'-phosphate
  modified_base 19: mod_base = OTHER; note = 2'-O-methyladenosine-3'-phosphate
  modified_base 20: mod_base = OTHER; note = 2'-O-methylguanosine-3'-phosphate
  modified_base 21: mod_base = OTHER; note = 2'-O-methylcytidine-3'-phosphate
  modified_base 22: mod_base = OTHER; note = 2'-O-methylguanosine-3'-phosphate
  modified_base 23: mod_base = OTHER; note = 2'-O-methyladenosine
ttccattcagaaactcatagcga

SEQ ID NO: 5236 - RNA, 23 nt, synthetic construct
  source 1..23: mol_type = other RNA
  modified_base 1: mod_base = OTHER; note = 2'-O-methyluridine-3'-phosphate 5'phosphate
  modified_base 2: mod_base = OTHER; note = 2'-deoxy-2'-fluorouridine-3'-phosphate
  modified_base 3: mod_base = OTHER; note = 2'-O-methyluridine-3'-phosphate
  modified_base 4: mod_base = OTHER; note = 2'-O-methylcytidine-3'-phosphate
  modified_base 5: mod_base = OTHER; note = 2'-O-methylcytidine-3'-phosphate
  modified_base 6: mod_base = OTHER; note = 2'-deoxy-2'-fluoroadenosine-3'-phosphate
  modified_base 7: mod_base = OTHER; note = 2'-O-methyluridine-3'-phosphate
  modified_base 8: mod_base = OTHER; note = 2'-O-methyluridine-3'-phosphate
  modified_base 9: mod_base = OTHER; note = 2'-O-methylcytidine-3'-phosphate
  modified_base 10: mod_base = OTHER; note = 2'-O-methyladenosine-3'-phosphate
  modified_base 11: mod_base = OTHER; note = 2'-O-methylguanosine-3'-phosphate
  modified_base 12: mod_base = OTHER; note = 2'-O-methyladenosine-3'-phosphate
  modified_base 13: mod_base = OTHER; note = 2'-O-methyladenosine-3'-phosphate
  modified_base 14: mod_base = OTHER; note = 2'-deoxy-2'-fluoroadenosine-3'-phosphate
  modified_base 15: mod_base = OTHER; note = 2'-O-methylcytidine-3'-phosphate
  modified_base 16: mod_base = OTHER; note = 2'-deoxy-2'-fluorouridine-3'-phosphate
  modified_base 17: mod_base = OTHER; note = 2'-O-methylcytidine-3'-phosphate
  modified_base 18: mod_base = OTHER; note = 2'-O-methyladenosine-3'-phosphate
  modified_base 19: mod_base = OTHER; note = 2'-O-methyluridine-3'-phosphate
  modified_base 20: mod_base = OTHER; note = 2'-O-methyladenosine-3'-phosphate
  modified_base 21: mod_base = OTHER; note = 2'-O-methylguanosine-3'-phosphate
  modified_base 22: mod_base = OTHER; note = 2'-O-methylcytidine-3'-phosphate
  modified_base 23: mod_base = OTHER; note = 2'-O-methylguanosine
tttccattcagaaactcatagcg

SEQ ID NO: 5237 - RNA, 23 nt, synthetic construct
  source 1..23: mol_type = other RNA
  modified_base 1: mod_base = OTHER; note = 2'-O-methyluridine-3'-phosphate 5'phosphate
  modified_base 2: mod_base = OTHER; note = 2'-deoxy-2'-fluorocytidine-3'-phosphate
  modified_base 3: mod_base = OTHER; note = 2'-O-methyluridine-3'-phosphate
  modified_base 4: mod_base = OTHER; note = 2'-O-methyluridine-3'-phosphate
  modified_base 5: mod_base = OTHER; note = 2'-O-methylcytidine-3'-phosphate
  modified_base 6: mod_base = OTHER; note = 2'-deoxy-2'-fluorocytidine-3'-phosphate
  modified_base 7: mod_base = OTHER; note = 2'-O-methyladenosine-3'-phosphate
  modified_base 8: mod_base = OTHER; note = 2'-O-methyluridine-3'-phosphate
  modified_base 9: mod_base = OTHER; note = 2'-O-methyluridine-3'-phosphate
  modified_base 10: mod_base = OTHER; note = 2'-O-methylcytidine-3'-phosphate
  modified_base 11: mod_base = OTHER; note = 2'-O-methyladenosine-3'-phosphate
  modified_base 12: mod_base = OTHER; note = 2'-O-methylguanosine-3'-phosphate
  modified_base 13: mod_base = OTHER; note = 2'-O-methyladenosine-3'-phosphate
  modified_base 14: mod_base = OTHER; note = 2'-deoxy-2'-fluoroadenosine-3'-phosphate
  modified_base 15: mod_base = OTHER; note = 2'-O-methyladenosine-3'-phosphate
  modified_base 16: mod_base = OTHER; note = 2'-deoxy-2'-fluorocytidine-3'-phosphate
  modified_base 17: mod_base = OTHER; note = 2'-O-methyluridine-3'-phosphate
  modified_base 18: mod_base = OTHER; note = 2'-O-methylcytidine-3'-phosphate
  modified_base 19: mod_base = OTHER; note = 2'-O-methyladenosine-3'-phosphate
  modified_base 20: mod_base = OTHER; note = 2'-O-methyluridine-3'-phosphate
  modified_base 21: mod_base = OTHER; note = 2'-O-methyladenosine-3'-phosphate
  modified_base 22: mod_base = OTHER; note = 2'-O-methylguanosine-3'-phosphate
  modified_base 23: mod_base = OTHER; note = 2'-O-methylcytidine
tcttccattcagaaactcatagc

SEQ ID NO: 5238 - RNA, 23 nt, synthetic construct
  source 1..23: mol_type = other RNA
  modified_base 1: mod_base = OTHER; note = 2'-O-methyluridine-3'-phosphate 5'phosphate
  modified_base 2: mod_base = OTHER; note = 2'-deoxy-2'-fluorouridine-3'-phosphate
  modified_base 3: mod_base = OTHER; note = 2'-O-methylcytidine-3'-phosphate
  modified_base 4: mod_base = OTHER; note = 2'-O-methyluridine-3'-phosphate
  modified_base 5: mod_base = OTHER; note = 2'-O-methyluridine-3'-phosphate
  modified_base 6: mod_base = OTHER; note = 2'-deoxy-2'-fluorocytidine-3'-phosphate
  modified_base 7: mod_base = OTHER; note = 2'-O-methylcytidine-3'-phosphate
  modified_base 8: mod_base = OTHER; note = 2'-O-methyladenosine-3'-phosphate
  modified_base 9: mod_base = OTHER; note = 2'-O-methyluridine-3'-phosphate
  modified_base 10: mod_base = OTHER; note = 2'-O-methyluridine-3'-phosphate
  modified_base 11: mod_base = OTHER; note = 2'-O-methylcytidine-3'-phosphate
  modified_base 12: mod_base = OTHER; note = 2'-O-methyladenosine-3'-phosphate
  modified_base 13: mod_base = OTHER; note = 2'-O-methylguanosine-3'-phosphate
  modified_base 14: mod_base = OTHER; note = 2'-deoxy-2'-fluoroadenosine-3'-phosphate
  modified_base 15: mod_base = OTHER; note = 2'-O-methyladenosine-3'-phosphate
  modified_base 16: mod_base = OTHER; note = 2'-deoxy-2'-fluoroadenosine-3'-phosphate
  modified_base 17: mod_base = OTHER; note = 2'-O-methylcytidine-3'-phosphate
  modified_base 18: mod_base = OTHER; note = 2'-O-methyluridine-3'-phosphate
  modified_base 19: mod_base = OTHER; note = 2'-O-methylcytidine-3'-phosphate
  modified_base 20: mod_base = OTHER; note = 2'-O-methyladenosine-3'-phosphate
  modified_base 21: mod_base = OTHER; note = 2'-O-methyluridine-3'-phosphate
  modified_base 22: mod_base = OTHER; note = 2'-O-methyladenosine-3'-phosphate
  modified_base 23: mod_base = OTHER; note = 2'-O-methylguanosine
ttcttccattcagaaactcatag

SEQ ID NO: 5239 - RNA, 23 nt, synthetic construct
  source 1..23: mol_type = other RNA
  modified_base 1: mod_base = OTHER; note = 2'-O-methyluridine-3'-phosphate 5'phosphate
  modified_base 2: mod_base = OTHER; note = 2'-deoxy-2'-fluorocytidine-3'-phosphate
  modified_base 3: mod_base = OTHER; note = 2'-O-methyluridine-3'-phosphate
  modified_base 4: mod_base = OTHER; note = 2'-O-methylcytidine-3'-phosphate
  modified_base 5: mod_base = OTHER; note = 2'-O-methyluridine-3'-phosphate
  modified_base 6: mod_base = OTHER; note = 2'-deoxy-2'-fluorouridine-3'-phosphate
  modified_base 7: mod_base = OTHER; note = 2'-O-methylcytidine-3'-phosphate
  modified_base 8: mod_base = OTHER; note = 2'-O-methylcytidine-3'-phosphate
  modified_base 9: mod_base = OTHER; note = 2'-O-methyladenosine-3'-phosphate
  modified_base 10: mod_base = OTHER; note = 2'-O-methyluridine-3'-phosphate
  modified_base 11: mod_base = OTHER; note = 2'-O-methyluridine-3'-phosphate
  modified_base 12: mod_base = OTHER; note = 2'-O-methylcytidine-3'-phosphate
  modified_base 13: mod_base = OTHER; note = 2'-O-methyladenosine-3'-phosphate
  modified_base 14: mod_base = OTHER; note = 2'-deoxy-2'-fluoroguanosine-3'-phosphate
  modified_base 15: mod_base = OTHER; note = 2'-O-methyladenosine-3'-phosphate
  modified_base 16: mod_base = OTHER; note = 2'-deoxy-2'-fluoroadenosine-3'-phosphate
  modified_base 17: mod_base = OTHER; note = 2'-O-methyladenosine-3'-phosphate
  modified_base 18: mod_base = OTHER; note = 2'-O-methylcytidine-3'-phosphate
  modified_base 19: mod_base = OTHER; note = 2'-O-methyluridine-3'-phosphate
  modified_base 20: mod_base = OTHER; note = 2'-O-methylcytidine-3'-phosphate
  modified_base 21: mod_base = OTHER; note = 2'-O-methyladenosine-3'-phosphate
  modified_base 22: mod_base = OTHER; note = 2'-O-methyluridine-3'-phosphate
  modified_base 23: mod_base = OTHER; note = 2'-O-methyladenosine
tctcttccattcagaaactcata

SEQ ID NO: 5240 - RNA, 23 nt, synthetic construct
  source 1..23: mol_type = other RNA
  modified_base 1: mod_base = OTHER; note = 2'-O-methyluridine-3'-phosphate 5'phosphate
  modified_base 2: mod_base = OTHER; note = 2'-deoxy-2'-fluoroadenosine-3'-phosphate
  modified_base 3: mod_base = OTHER; note = 2'-O-methylcytidine-3'-phosphate
  modified_base 4: mod_base = OTHER; note = 2'-O-methyluridine-3'-phosphate
  modified_base 5: mod_base = OTHER; note = 2'-O-methylcytidine-3'-phosphate
  modified_base 6: mod_base = OTHER; note = 2'-deoxy-2'-fluorouridine-3'-phosphate
  modified_base 7: mod_base = OTHER; note = 2'-O-methyluridine-3'-phosphate
  modified_base 8: mod_base = OTHER; note = 2'-O-methylcytidine-3'-phosphate
  modified_base 9: mod_base = OTHER; note = 2'-O-methylcytidine-3'-phosphate
  modified_base 10: mod_base = OTHER; note = 2'-O-methyladenosine-3'-phosphate
  modified_base 11: mod_base = OTHER; note = 2'-O-methyluridine-3'-phosphate
  modified_base 12: mod_base = OTHER; note = 2'-O-methyluridine-3'-phosphate
  modified_base 13: mod_base = OTHER; note = 2'-O-methylcytidine-3'-phosphate
  modified_base 14: mod_base = OTHER; note = 2'-deoxy-2'-fluoroadenosine-3'-phosphate
  modified_base 15: mod_base = OTHER; note = 2'-O-methylguanosine-3'-phosphate
  modified_base 16: mod_base = OTHER; note = 2'-deoxy-2'-fluoroadenosine-3'-phosphate
  modified_base 17: mod_base = OTHER; note = 2'-O-methyladenosine-3'-phosphate
  modified_base 18: mod_base = OTHER; note = 2'-O-methyladenosine-3'-phosphate
  modified_base 19: mod_base = OTHER; note = 2'-O-methylcytidine-3'-phosphate
  modified_base 20: mod_base = OTHER; note = 2'-O-methyluridine-3'-phosphate
  modified_base 21: mod_base = OTHER; note = 2'-O-methylcytidine-3'-phosphate
  modified_base 22: mod_base = OTHER; note = 2'-O-methyladenosine-3'-phosphate
  modified_base 23: mod_base = OTHER; note = 2'-O-methyluridine
tactcttccattcagaaactcat

SEQ ID NO: 5241 - RNA, 23 nt, synthetic construct
  source 1..23: mol_type = other RNA
  modified_base 1: mod_base = OTHER; note = 2'-O-methyluridine-3'-phosphate 5'phosphate
  modified_base 2: mod_base = OTHER; note = 2'-deoxy-2'-fluoroguanosine-3'-phosphate
  modified_base 3: mod_base = OTHER; note = 2'-O-methylguanosine-3'-phosphate
  modified_base 4: mod_base = OTHER; note = 2'-O-methyladenosine-3'-phosphate
  modified_base 5: mod_base = OTHER; note = 2'-O-methylcytidine-3'-phosphate
  modified_base 6: mod_base = OTHER; note = 2'-deoxy-2'-fluorouridine-3'-phosphate
  modified_base 7: mod_base = OTHER; note = 2'-O-methylcytidine-3'-phosphate
  modified_base 8: mod_base = OTHER; note = 2'-O-methyluridine-3'-phosphate
  modified_base 9: mod_base = OTHER; note = 2'-O-methyluridine-3'-phosphate
  modified_base 10: mod_base = OTHER; note = 2'-O-methylcytidine-3'-phosphate
  modified_base 11: mod_base = OTHER; note = 2'-O-methylcytidine-3'-phosphate
  modified_base 12: mod_base = OTHER; note = 2'-O-methyladenosine-3'-phosphate
  modified_base 13: mod_base = OTHER; note = 2'-O-methyluridine-3'-phosphate
  modified_base 14: mod_base = OTHER; note = 2'-deoxy-2'-fluorouridine-3'-phosphate
  modified_base 15: mod_base = OTHER; note = 2'-O-methylcytidine-3'-phosphate
  modified_base 16: mod_base = OTHER; note = 2'-deoxy-2'-fluoroadenosine-3'-phosphate
  modified_base 17: mod_base = OTHER; note = 2'-O-methylguanosine-3'-phosphate
  modified_base 18: mod_base = OTHER; note = 2'-O-methyladenosine-3'-phosphate
  modified_base 19: mod_base = OTHER; note = 2'-O-methyladenosine-3'-phosphate
  modified_base 20: mod_base = OTHER; note = 2'-O-methyladenosine-3'-phosphate
  modified_base 21: mod_base = OTHER; note = 2'-O-methylcytidine-3'-phosphate
  modified_base 22: mod_base = OTHER; note = 2'-O-methyluridine-3'-phosphate
  modified_base 23: mod_base = OTHER; note = 2'-O-methylcytidine
tggactcttccattcagaaactc

SEQ ID NO: 5242 - RNA, 23 nt, synthetic construct
  source 1..23: mol_type = other RNA
  modified_base 1: mod_base = OTHER; note = 2'-O-methyluridine-3'-phosphate 5'phosphate
  modified_base 2: mod_base = OTHER; note = 2'-deoxy-2'-fluorouridine-3'-phosphate
  modified_base 3: mod_base = OTHER; note = 2'-O-methylguanosine-3'-phosphate
  modified_base 4: mod_base = OTHER; note = 2'-O-methylguanosine-3'-phosphate
  modified_base 5: mod_base = OTHER; note = 2'-O-methyladenosine-3'-phosphate
  modified_base 6: mod_base = OTHER; note = 2'-deoxy-2'-fluorocytidine-3'-phosphate
  modified_base 7: mod_base = OTHER; note = 2'-O-methyluridine-3'-phosphate
  modified_base 8: mod_base = OTHER; note = 2'-O-methylcytidine-3'-phosphate
  modified_base 9: mod_base = OTHER; note = 2'-O-methyluridine-3'-phosphate
  modified_base 10: mod_base = OTHER; note = 2'-O-methyluridine-3'-phosphate
  modified_base 11: mod_base = OTHER; note = 2'-O-methylcytidine-3'-phosphate
  modified_base 12: mod_base = OTHER; note = 2'-O-methylcytidine-3'-phosphate
  modified_base 13: mod_base = OTHER; note = 2'-O-methyladenosine-3'-phosphate
  modified_base 14: mod_base = OTHER; note = 2'-deoxy-2'-fluorouridine-3'-phosphate
  modified_base 15: mod_base = OTHER; note = 2'-O-methyluridine-3'-phosphate
  modified_base 16: mod_base = OTHER; note = 2'-deoxy-2'-fluorocytidine-3'-phosphate
  modified_base 17: mod_base = OTHER; note = 2'-O-methyladenosine-3'-phosphate
  modified_base 18: mod_base = OTHER; note = 2'-O-methylguanosine-3'-phosphate
  modified_base 19: mod_base = OTHER; note = 2'-O-methyladenosine-3'-phosphate
  modified_base 20: mod_base = OTHER; note = 2'-O-methyladenosine-3'-phosphate
  modified_base 21: mod_base = OTHER; note = 2'-O-methyladenosine-3'-phosphate
  modified_base 22: mod_base = OTHER; note = 2'-O-methylcytidine-3'-phosphate
  modified_base 23: mod_base = OTHER; note = 2'-O-methyluridine
ttggactcttccattcagaaact

SEQ ID NO: 5243 - RNA, 23 nt, synthetic construct
  source 1..23: mol_type = other RNA
  modified_base 1: mod_base = OTHER; note = 2'-O-methyluridine-3'-phosphate 5'phosphate
  modified_base 2: mod_base = OTHER; note = 2'-deoxy-2'-fluorouridine-3'-phosphate
  modified_base 3: mod_base = OTHER; note = 2'-O-methyluridine-3'-phosphate
  modified_base 4: mod_base = OTHER; note = 2'-O-methylguanosine-3'-phosphate
  modified_base 5: mod_base = OTHER; note = 2'-O-methylguanosine-3'-phosphate
  modified_base 6: mod_base = OTHER; note = 2'-deoxy-2'-fluoroadenosine-3'-phosphate
  modified_base 7: mod_base = OTHER; note = 2'-O-methylcytidine-3'-phosphate
  modified_base 8: mod_base = OTHER; note = 2'-O-methyluridine-3'-phosphate
  modified_base 9: mod_base = OTHER; note = 2'-O-methylcytidine-3'-phosphate
  modified_base 10: mod_base = OTHER; note = 2'-O-methyluridine-3'-phosphate
  modified_base 11: mod_base = OTHER; note = 2'-O-methyluridine-3'-phosphate
  modified_base 12: mod_base = OTHER; note = 2'-O-methylcytidine-3'-phosphate
  modified_base 13: mod_base = OTHER; note = 2'-O-methylcytidine-3'-phosphate
  modified_base 14: mod_base = OTHER; note = 2'-deoxy-2'-fluoroadenosine-3'-phosphate
  modified_base 15: mod_base = OTHER; note = 2'-O-methyluridine-3'-phosphate
  modified_base 16: mod_base = OTHER; note = 2'-deoxy-2'-fluorouridine-3'-phosphate
  modified_base 17: mod_base = OTHER; note = 2'-O-methylcytidine-3'-phosphate
  modified_base 18: mod_base = OTHER; note = 2'-O-methyladenosine-3'-phosphate
  modified_base 19: mod_base = OTHER; note = 2'-O-methylguanosine-3'-phosphate
  modified_base 20: mod_base = OTHER; note = 2'-O-methyladenosine-3'-phosphate
  modified_base 21: mod_base = OTHER; note = 2'-O-methyladenosine-3'-phosphate
  modified_base 22: mod_base = OTHER; note = 2'-O-methyladenosine-3'-phosphate
  modified_base 23: mod_base = OTHER; note = 2'-O-methylcytidine
tttggactcttccattcagaaac

SEQ ID NO: 5244 - RNA, 23 nt, synthetic construct
  source 1..23: mol_type = other RNA
  modified_base 1: mod_base = OTHER; note = 2'-O-methyluridine-3'-phosphate 5'phosphate
  modified_base 2: mod_base = OTHER; note = 2'-deoxy-2'-fluoroadenosine-3'-phosphate
  modified_base 3: mod_base = OTHER; note = 2'-O-methyluridine-3'-phosphate
  modified_base 4: mod_base = OTHER; note = 2'-O-methyluridine-3'-phosphate
  modified_base 5: mod_base = OTHER; note = 2'-O-methylguanosine-3'-phosphate
  modified_base 6: mod_base = OTHER; note = 2'-deoxy-2'-fluoroguanosine-3'-phosphate
  modified_base 7: mod_base = OTHER; note = 2'-O-methyladenosine-3'-phosphate
  modified_base 8: mod_base = OTHER; note = 2'-O-methylcytidine-3'-phosphate
  modified_base 9: mod_base = OTHER; note = 2'-O-methyluridine-3'-phosphate
  modified_base 10: mod_base = OTHER; note = 2'-O-methylcytidine-3'-phosphate
  modified_base 11: mod_base = OTHER; note = 2'-O-methyluridine-3'-phosphate
  modified_base 12: mod_base = OTHER; note = 2'-O-methyluridine-3'-phosphate
  modified_base 13: mod_base = OTHER; note = 2'-O-methylcytidine-3'-phosphate
  modified_base 14: mod_base = OTHER; note = 2'-deoxy-2'-fluorocytidine-3'-phosphate
  modified_base 15: mod_base = OTHER; note = 2'-O-methyladenosine-3'-phosphate
  modified_base 16: mod_base = OTHER; note = 2'-deoxy-2'-fluorouridine-3'-phosphate
  modified_base 17: mod_base = OTHER; note = 2'-O-methyluridine-3'-phosphate
  modified_base 18: mod_base = OTHER; note = 2'-O-methylcytidine-3'-phosphate
  modified_base 19: mod_base = OTHER; note = 2'-O-methyladenosine-3'-phosphate
  modified_base 20: mod_base = OTHER; note = 2'-O-methylguanosine-3'-phosphate
  modified_base 21: mod_base = OTHER; note = 2'-O-methyladenosine-3'-phosphate
  modified_base 22: mod_base = OTHER; note = 2'-O-methyladenosine-3'-phosphate
  modified_base 23: mod_base = OTHER; note = 2'-O-methyladenosine
tattggactcttccattcagaaa

SEQ ID NO: 5245 - RNA, 23 nt, synthetic construct
  source 1..23: mol_type = other RNA
  modified_base 1: mod_base = OTHER; note = 2'-O-methyluridine-3'-phosphate 5'phosphate
  modified_base 2: mod_base = OTHER; note = 2'-deoxy-2'-fluoroguanosine-3'-phosphate
  modified_base 3: mod_base = OTHER; note = 2'-O-methyladenosine-3'-phosphate
  modified_base 4: mod_base = OTHER; note = 2'-O-methyluridine-3'-phosphate
  modified_base 5: mod_base = OTHER; note = 2'-O-methyluridine-3'-phosphate
  modified_base 6: mod_base = OTHER; note = 2'-deoxy-2'-fluoroguanosine-3'-phosphate
  modified_base 7: mod_base = OTHER; note = 2'-O-methylguanosine-3'-phosphate
  modified_base 8: mod_base = OTHER; note = 2'-O-methyladenosine-3'-phosphate
  modified_base 9: mod_base = OTHER; note = 2'-O-methylcytidine-3'-phosphate
  modified_base 10: mod_base = OTHER; note = 2'-O-methyluridine-3'-phosphate
  modified_base 11: mod_base = OTHER; note = 2'-O-methylcytidine-3'-phosphate
  modified_base 12: mod_base = OTHER; note = 2'-O-methyluridine-3'-phosphate
  modified_base 13: mod_base = OTHER; note = 2'-O-methyluridine-3'-phosphate
  modified_base 14: mod_base = OTHER; note = 2'-deoxy-2'-fluorocytidine-3'-phosphate
  modified_base 15: mod_base = OTHER; note = 2'-O-methylcytidine-3'-phosphate
  modified_base 16: mod_base = OTHER; note = 2'-deoxy-2'-fluoroadenosine-3'-phosphate
  modified_base 17: mod_base = OTHER; note = 2'-O-methyluridine-3'-phosphate
  modified_base 18: mod_base = OTHER; note = 2'-O-methyluridine-3'-phosphate
  modified_base 19: mod_base = OTHER; note = 2'-O-methylcytidine-3'-phosphate
  modified_base 20: mod_base = OTHER; note = 2'-O-methyladenosine-3'-phosphate
  modified_base 21: mod_base = OTHER; note = 2'-O-methylguanosine-3'-phosphate
  modified_base 22: mod_base = OTHER; note = 2'-O-methyladenosine-3'-phosphate
  modified_base 23: mod_base = OTHER; note = 2'-O-methyladenosine
tgattggactcttccattcagaa

SEQ ID NO: 5246 - RNA, 23 nt, synthetic construct
  source 1..23: mol_type = other RNA
  modified_base 1: mod_base = OTHER; note = 2'-O-methyluridine-3'-phosphate 5'phosphate
  modified_base 2: mod_base = OTHER; note = 2'-deoxy-2'-fluorouridine-3'-phosphate
  modified_base 3: mod_base = OTHER; note = 2'-O-methylguanosine-3'-phosphate
  modified_base 4: mod_base = OTHER; note = 2'-O-methylguanosine-3'-phosphate
  modified_base 5: mod_base = OTHER; note = 2'-O-methyladenosine-3'-phosphate
  modified_base 6: mod_base = OTHER; note = 2'-deoxy-2'-fluorouridine-3'-phosphate
  modified_base 7: mod_base = OTHER; note = 2'-O-methyluridine-3'-phosphate
  modified_base 8: mod_base = OTHER; note = 2'-O-methylguanosine-3'-phosphate
  modified_base 9: mod_base = OTHER; note = 2'-O-methylguanosine-3'-phosphate
  modified_base 10: mod_base = OTHER; note = 2'-O-methyladenosine-3'-phosphate
  modified_base 11: mod_base = OTHER; note = 2'-O-methylcytidine-3'-phosphate
  modified_base 12: mod_base = OTHER; note = 2'-O-methyluridine-3'-phosphate
  modified_base 13: mod_base = OTHER; note = 2'-O-methylcytidine-3'-phosphate
  modified_base 14: mod_base = OTHER; note = 2'-deoxy-2'-fluorouridine-3'-phosphate
  modified_base 15: mod_base = OTHER; note = 2'-O-methyluridine-3'-phosphate
  modified_base 16: mod_base = OTHER; note = 2'-deoxy-2'-fluorocytidine-3'-phosphate
  modified_base 17: mod_base = OTHER; note = 2'-O-methylcytidine-3'-phosphate
  modified_base 18: mod_base = OTHER; note = 2'-O-methyladenosine-3'-phosphate
  modified_base 19: mod_base = OTHER; note = 2'-O-methyluridine-3'-phosphate
  modified_base 20: mod_base = OTHER; note = 2'-O-methyluridine-3'-phosphate
  modified_base 21: mod_base = OTHER; note = 2'-O-methylcytidine-3'-phosphate
  modified_base 22: mod_base = OTHER; note = 2'-O-methyladenosine-3'-phosphate
  modified_base 23: mod_base = OTHER; note = 2'-O-methylguanosine
ttggattggactcttccattcag

SEQ ID NO: 5247 - RNA, 23 nt, synthetic construct
  source 1..23: mol_type = other RNA
  modified_base 1: mod_base = OTHER; note = 2'-O-methyluridine-3'-phosphate 5'phosphate
  modified_base 2: mod_base = OTHER; note = 2'-deoxy-2'-fluoroadenosine-3'-phosphate
  modified_base 3: mod_base = OTHER; note = 2'-O-methyladenosine-3'-phosphate
  modified_base 4: mod_base = OTHER; note = 2'-O-methyladenosine-3'-phosphate
  modified_base 5: mod_base = OTHER; note = 2'-O-methyluridine-3'-phosphate
  modified_base 6: mod_base = OTHER; note = 2'-deoxy-2'-fluoroguanosine-3'-phosphate
  modified_base 7: mod_base = OTHER; note = 2'-O-methylcytidine-3'-phosphate
  modified_base 8: mod_base = OTHER; note = 2'-O-methylcytidine-3'-phosphate
  modified_base 9: mod_base = OTHER; note = 2'-O-methylcytidine-3'-phosphate
  modified_base 10: mod_base = OTHER; note = 2'-O-methyladenosine-3'-phosphate
  modified_base 11: mod_base = OTHER; note = 2'-O-methylguanosine-3'-phosphate
  modified_base 12: mod_base = OTHER; note = 2'-O-methylcytidine-3'-phosphate
  modified_base 13: mod_base = OTHER; note = 2'-O-methyladenosine-3'-phosphate
  modified_base 14: mod_base = OTHER; note = 2'-deoxy-2'-fluorocytidine-3'-phosphate
  modified_base 15: mod_base = OTHER; note = 2'-O-methyladenosine-3'-phosphate
  modified_base 16: mod_base = OTHER; note = 2'-deoxy-2'-fluoroguanosine-3'-phosphate
  modified_base 17: mod_base = OTHER; note = 2'-O-methyladenosine-3'-phosphate
  modified_base 18: mod_base = OTHER; note = 2'-O-methylguanosine-3'-phosphate
  modified_base 19: mod_base = OTHER; note = 2'-O-methyluridine-3'-phosphate
  modified_base 20: mod_base = OTHER; note = 2'-O-methyluridine-3'-phosphate
  modified_base 21: mod_base = OTHER; note = 2'-O-methylcytidine-3'-phosphate
  modified_base 22: mod_base = OTHER; note = 2'-O-methylguanosine-3'-phosphate
  modified_base 23: mod_base = OTHER; note = 2'-O-methylguanosine
taaatgcccagcacagagttcgg

SEQ ID NO: 5248 - RNA, 23 nt, synthetic construct
  source 1..23: mol_type = other RNA
  modified_base 1: mod_base = OTHER; note = 2'-O-methyluridine-3'-phosphate 5'phosphate
  modified_base 2: mod_base = OTHER; note = 2'-deoxy-2'-fluorocytidine-3'-phosphate
  modified_base 3: mod_base = OTHER; note = 2'-O-methyladenosine-3'-phosphate
  modified_base 4: mod_base = OTHER; note = 2'-O-methyladenosine-3'-phosphate
  modified_base 5: mod_base = OTHER; note = 2'-O-methyladenosine-3'-phosphate
  modified_base 6: mod_base = OTHER; note = 2'-deoxy-2'-fluorouridine-3'-phosphate
  modified_base 7: mod_base = OTHER; note = 2'-O-methylguanosine-3'-phosphate
  modified_base 8: mod_base = OTHER; note = 2'-O-methylcytidine-3'-phosphate
  modified_base 9: mod_base = OTHER; note = 2'-O-methylcytidine-3'-phosphate
  modified_base 10: mod_base = OTHER; note = 2'-O-methylcytidine-3'-phosphate
  modified_base 11: mod_base = OTHER; note = 2'-O-methyladenosine-3'-phosphate
  modified_base 12: mod_base = OTHER; note = 2'-O-methylguanosine-3'-phosphate
  modified_base 13: mod_base = OTHER; note = 2'-O-methylcytidine-3'-phosphate
  modified_base 14: mod_base = OTHER; note = 2'-deoxy-2'-fluoroadenosine-3'-phosphate
  modified_base 15: mod_base = OTHER; note = 2'-O-methylcytidine-3'-phosphate
  modified_base 16: mod_base = OTHER; note = 2'-deoxy-2'-fluoroadenosine-3'-phosphate
  modified_base 17: mod_base = OTHER; note = 2'-O-methylguanosine-3'-phosphate
  modified_base 18: mod_base = OTHER; note = 2'-O-methyladenosine-3'-phosphate
  modified_base 19: mod_base = OTHER; note = 2'-O-methylguanosine-3'-phosphate
  modified_base 20: mod_base = OTHER; note = 2'-O-methyluridine-3'-phosphate
  modified_base 21: mod_base = OTHER; note = 2'-O-methyluridine-3'-phosphate
  modified_base 22: mod_base = OTHER; note = 2'-O-methylcytidine-3'-phosphate
  modified_base 23: mod_base = OTHER; note = 2'-O-methylguanosine
tcaaatgcccagcacagagttcg

SEQ ID NO: 5249 - RNA, 23 nt, synthetic construct
  source 1..23: mol_type = other RNA
  modified_base 1: mod_base = OTHER; note = 2'-O-methyluridine-3'-phosphate 5'phosphate
  modified_base 2: mod_base = OTHER; note = 2'-deoxy-2'-fluoroguanosine-3'-phosphate
  modified_base 3: mod_base = OTHER; note = 2'-O-methylcytidine-3'-phosphate
  modified_base 4: mod_base = OTHER; note = 2'-O-methylcytidine-3'-phosphate
  modified_base 5: mod_base = OTHER; note = 2'-O-methyladenosine-3'-phosphate
  modified_base 6: mod_base = OTHER; note = 2'-deoxy-2'-fluoroadenosine-3'-phosphate
  modified_base 7: mod_base = OTHER; note = 2'-O-methyladenosine-3'-phosphate
  modified_base 8: mod_base = OTHER; note = 2'-O-methyluridine-3'-phosphate
  modified_base 9: mod_base = OTHER; note = 2'-O-methylguanosine-3'-phosphate
  modified_base 10: mod_base = OTHER; note = 2'-O-methylcytidine-3'-phosphate
  modified_base 11: mod_base = OTHER; note = 2'-O-methylcytidine-3'-phosphate
  modified_base 12: mod_base = OTHER; note = 2'-O-methylcytidine-3'-phosphate
  modified_base 13: mod_base = OTHER; note = 2'-O-methyladenosine-3'-phosphate
  modified_base 14: mod_base = OTHER; note = 2'-deoxy-2'-fluoroguanosine-3'-phosphate
  modified_base 15: mod_base = OTHER; note = 2'-O-methylcytidine-3'-phosphate
  modified_base 16: mod_base = OTHER; note = 2'-deoxy-2'-fluoroadenosine-3'-phosphate
  modified_base 17: mod_base = OTHER; note = 2'-O-methylcytidine-3'-phosphate
  modified_base 18: mod_base = OTHER; note = 2'-O-methyladenosine-3'-phosphate
  modified_base 19: mod_base = OTHER; note = 2'-O-methylguanosine-3'-phosphate
  modified_base 20: mod_base = OTHER; note = 2'-O-methyladenosine-3'-phosphate
  modified_base 21: mod_base = OTHER; note = 2'-O-methylguanosine-3'-phosphate
  modified_base 22: mod_base = OTHER; note = 2'-O-methyluridine-3'-phosphate
  modified_base 23: mod_base = OTHER; note = 2'-O-methyluridine
tgccaaatgcccagcacagagtt

SEQ ID NO: 5250 - RNA, 23 nt, synthetic construct
  source 1..23: mol_type = other RNA
  modified_base 1: mod_base = OTHER; note = 2'-O-methyluridine-3'-phosphate 5'phosphate
  modified_base 2: mod_base = OTHER; note = 2'-deoxy-2'-fluoroguanosine-3'-phosphate
  modified_base 3: mod_base = OTHER; note = 2'-O-methylguanosine-3'-phosphate
  modified_base 4: mod_base = OTHER; note = 2'-O-methylcytidine-3'-phosphate
  modified_base 5: mod_base = OTHER; note = 2'-O-methylcytidine-3'-phosphate
  modified_base 6: mod_base = OTHER; note = 2'-deoxy-2'-fluoroadenosine-3'-phosphate
  modified_base 7: mod_base = OTHER; note = 2'-O-methyladenosine-3'-phosphate
  modified_base 8: mod_base = OTHER; note = 2'-O-methyladenosine-3'-phosphate
  modified_base 9: mod_base = OTHER; note = 2'-O-methyluridine-3'-phosphate
  modified_base 10: mod_base = OTHER; note = 2'-O-methylguanosine-3'-phosphate
  modified_base 11: mod_base = OTHER; note = 2'-O-methylcytidine-3'-phosphate
  modified_base 12: mod_base = OTHER; note = 2'-O-methylcytidine-3'-phosphate
  modified_base 13: mod_base = OTHER; note = 2'-O-methylcytidine-3'-phosphate
  modified_base 14: mod_base = OTHER; note = 2'-deoxy-2'-fluoroadenosine-3'-phosphate
  modified_base 15: mod_base = OTHER; note = 2'-O-methylguanosine-3'-phosphate
  modified_base 16: mod_base = OTHER; note = 2'-deoxy-2'-fluorocytidine-3'-phosphate
  modified_base 17: mod_base = OTHER; note = 2'-O-methyladenosine-3'-phosphate
  modified_base 18: mod_base = OTHER; note = 2'-O-methylcytidine-3'-phosphate
  modified_base 19: mod_base = OTHER; note = 2'-O-methyladenosine-3'-phosphate
  modified_base 20: mod_base = OTHER; note = 2'-O-methylguanosine-3'-phosphate
  modified_base 21: mod_base = OTHER; note = 2'-O-methyladenosine-3'-phosphate
  modified_base 22: mod_base = OTHER; note = 2'-O-methylguanosine-3'-phosphate
  modified_base 23: mod_base = OTHER; note = 2'-O-methyluridine
tggccaaatgcccagcacagagt

SEQ ID NO: 5251 - RNA, 23 nt, synthetic construct
  source 1..23: mol_type = other RNA
  modified_base 1: mod_base = OTHER; note = 2'-O-methyluridine-3'-phosphate 5'phosphate
  modified_base 2: mod_base = OTHER; note = 2'-deoxy-2'-fluorocytidine-3'-phosphate
  modified_base 3: mod_base = OTHER; note = 2'-O-methylcytidine-3'-phosphate
  modified_base 4: mod_base = OTHER; note = 2'-O-methylguanosine-3'-phosphate
  modified_base 5: mod_base = OTHER; note = 2'-O-methylguanosine-3'-phosphate
  modified_base 6: mod_base = OTHER; note = 2'-deoxy-2'-fluorocytidine-3'-phosphate
  modified_base 7: mod_base = OTHER; note = 2'-O-methylcytidine-3'-phosphate
  modified_base 8: mod_base = OTHER; note = 2'-O-methyladenosine-3'-phosphate
  modified_base 9: mod_base = OTHER; note = 2'-O-methyladenosine-3'-phosphate
  modified_base 10: mod_base = OTHER; note = 2'-O-methyladenosine-3'-phosphate
  modified_base 11: mod_base = OTHER; note = 2'-O-methyluridine-3'-phosphate
  modified_base 12: mod_base = OTHER; note = 2'-O-methylguanosine-3'-phosphate
  modified_base 13: mod_base = OTHER; note = 2'-O-methylcytidine-3'-phosphate
  modified_base 14: mod_base = OTHER; note = 2'-deoxy-2'-fluorocytidine-3'-phosphate
  modified_base 15: mod_base = OTHER; note = 2'-O-methylcytidine-3'-phosphate
  modified_base 16: mod_base = OTHER; note = 2'-deoxy-2'-fluoroadenosine-3'-phosphate
  modified_base 17: mod_base = OTHER; note = 2'-O-methylguanosine-3'-phosphate
  modified_base 18: mod_base = OTHER; note = 2'-O-methylcytidine-3'-phosphate
  modified_base 19: mod_base = OTHER; note = 2'-O-methyladenosine-3'-phosphate
  modified_base 20: mod_base = OTHER; note = 2'-O-methylcytidine-3'-phosphate
  modified_base 21: mod_base = OTHER; note = 2'-O-methyladenosine-3'-phosphate
  modified_base 22: mod_base = OTHER; note = 2'-O-methylguanosine-3'-phosphate
  modified_base 23: mod_base = OTHER; note = 2'-O-methyladenosine
tccggccaaatgcccagcacaga

SEQ ID NO: 5252 - RNA, 23 nt, synthetic construct
  source 1..23: mol_type = other RNA
  modified_base 1: mod_base = OTHER; note = 2'-O-methyluridine-3'-phosphate 5'phosphate
  modified_base 2: mod_base = OTHER; note = 2'-deoxy-2'-fluorouridine-3'-phosphate
  modified_base 3: mod_base = OTHER; note = 2'-O-methylcytidine-3'-phosphate
  modified_base 4: mod_base = OTHER; note = 2'-O-methylcytidine-3'-phosphate
  modified_base 5: mod_base = OTHER; note = 2'-O-methylguanosine-3'-phosphate
  modified_base 6: mod_base = OTHER; note = 2'-deoxy-2'-fluoroguanosine-3'-phosphate
  modified_base 7: mod_base = OTHER; note = 2'-O-methylcytidine-3'-phosphate
  modified_base 8: mod_base = OTHER; note = 2'-O-methylcytidine-3'-phosphate
  modified_base 9: mod_base = OTHER; note = 2'-O-methyladenosine-3'-phosphate
  modified_base 10: mod_base = OTHER; note = 2'-O-methyladenosine-3'-phosphate
  modified_base 11: mod_base = OTHER; note = 2'-O-methyladenosine-3'-phosphate
  modified_base 12: mod_base = OTHER; note = 2'-O-methyluridine-3'-phosphate
  modified_base 13: mod_base = OTHER; note = 2'-O-methylguanosine-3'-phosphate
  modified_base 14: mod_base = OTHER; note = 2'-deoxy-2'-fluorocytidine-3'-phosphate
  modified_base 15: mod_base = OTHER; note = 2'-O-methylcytidine-3'-phosphate
  modified_base 16: mod_base = OTHER; note = 2'-deoxy-2'-fluorocytidine-3'-phosphate
  modified_base 17: mod_base = OTHER; note = 2'-O-methyladenosine-3'-phosphate
  modified_base 18: mod_base = OTHER; note = 2'-O-methylguanosine-3'-phosphate
  modified_base 19: mod_base = OTHER; note = 2'-O-methylcytidine-3'-phosphate
  modified_base 20: mod_base = OTHER; note = 2'-O-methyladenosine-3'-phosphate
  modified_base 21: mod_base = OTHER; note = 2'-O-methylcytidine-3'-phosphate
  modified_base 22: mod_base = OTHER; note = 2'-O-methyladenosine-3'-phosphate
  modified_base 23: mod_base = OTHER; note = 2'-O-methylguanosine
ttccggccaaatgcccagcacag

SEQ ID NO: 5253 - RNA, 23 nt, synthetic construct
  source 1..23: mol_type = other RNA
  modified_base 1: mod_base = OTHER; note = 2'-O-methyluridine-3'-phosphate 5'phosphate
  modified_base 2: mod_base = OTHER; note = 2'-deoxy-2'-fluorocytidine-3'-phosphate
  modified_base 3: mod_base = OTHER; note = 2'-O-methyluridine-3'-phosphate
  modified_base 4: mod_base = OTHER; note = 2'-O-methylcytidine-3'-phosphate
  modified_base 5: mod_base = OTHER; note = 2'-O-methylcytidine-3'-phosphate
  modified_base 6: mod_base = OTHER; note = 2'-deoxy-2'-fluoroguanosine-3'-phosphate
  modified_base 7: mod_base = OTHER; note = 2'-O-methylguanosine-3'-phosphate
  modified_base 8: mod_base = OTHER; note = 2'-O-methylcytidine-3'-phosphate
  modified_base 9: mod_base = OTHER; note = 2'-O-methylcytidine-3'-phosphate
  modified_base 10: mod_base = OTHER; note = 2'-O-methyladenosine-3'-phosphate
  modified_base 11: mod_base = OTHER; note = 2'-O-methyladenosine-3'-phosphate
  modified_base 12: mod_base = OTHER; note = 2'-O-methyladenosine-3'-phosphate
  modified_base 13: mod_base = OTHER; note = 2'-O-methyluridine-3'-phosphate
  modified_base 14: mod_base = OTHER; note = 2'-deoxy-2'-fluoroguanosine-3'-phosphate
  modified_base 15: mod_base = OTHER; note = 2'-O-methylcytidine-3'-phosphate
  modified_base 16: mod_base = OTHER; note = 2'-deoxy-2'-fluorocytidine-3'-phosphate
  modified_base 17: mod_base = OTHER; note = 2'-O-methylcytidine-3'-phosphate
  modified_base 18: mod_base = OTHER; note = 2'-O-methyladenosine-3'-phosphate
  modified_base 19: mod_base = OTHER; note = 2'-O-methylguanosine-3'-phosphate
  modified_base 20: mod_base = OTHER; note = 2'-O-methylcytidine-3'-phosphate
  modified_base 21: mod_base = OTHER; note = 2'-O-methyladenosine-3'-phosphate
  modified_base 22: mod_base = OTHER; note = 2'-O-methylcytidine-3'-phosphate
  modified_base 23: mod_base = OTHER; note = 2'-O-methyladenosine
tctccggccaaatgcccagcaca

SEQ ID NO: 5254 - RNA, 23 nt, synthetic construct
  source 1..23: mol_type = other RNA
  modified_base 1: mod_base = OTHER; note = 2'-O-methyluridine-3'-phosphate 5'phosphate
  modified_base 2: mod_base = OTHER; note = 2'-deoxy-2'-fluorouridine-3'-phosphate
  modified_base 3: mod_base = OTHER; note = 2'-O-methylguanosine-3'-phosphate
  modified_base 4: mod_base = OTHER; note = 2'-O-methyluridine-3'-phosphate
  modified_base 5: mod_base = OTHER; note = 2'-O-methyladenosine-3'-phosphate
  modified_base 6: mod_base = OTHER; note = 2'-deoxy-2'-fluorouridine-3'-phosphate
  modified_base 7: mod_base = OTHER; note = 2'-O-methyluridine-3'-phosphate
  modified_base 8: mod_base = OTHER; note = 2'-O-methyluridine-3'-phosphate
  modified_base 9: mod_base = OTHER; note = 2'-O-methylguanosine-3'-phosphate
  modified_base 10: mod_base = OTHER; note = 2'-O-methyluridine-3'-phosphate
  modified_base 11: mod_base = OTHER; note = 2'-O-methylcytidine-3'-phosphate
  modified_base 12: mod_base = OTHER; note = 2'-O-methylcytidine-3'-phosphate
  modified_base 13: mod_base = OTHER; note = 2'-O-methyluridine-3'-phosphate
  modified_base 14: mod_base = OTHER; note = 2'-deoxy-2'-fluorouridine-3'-phosphate
  modified_base 15: mod_base = OTHER; note = 2'-O-methylcytidine-3'-phosphate
  modified_base 16: mod_base = OTHER; note = 2'-deoxy-2'-fluorouridine-3'-phosphate
  modified_base 17: mod_base = OTHER; note = 2'-O-methylcytidine-3'-phosphate
  modified_base 18: mod_base = OTHER; note = 2'-O-methylguanosine-3'-phosphate
  modified_base 19: mod_base = OTHER; note = 2'-O-methyladenosine-3'-phosphate
  modified_base 20: mod_base = OTHER; note = 2'-O-methyladenosine-3'-phosphate
  modified_base 21: mod_base = OTHER; note = 2'-O-methylguanosine-3'-phosphate
  modified_base 22: mod_base = OTHER; note = 2'-O-methylcytidine-3'-phosphate
  modified_base 23: mod_base = OTHER; note = 2'-O-methyladenosine
ttgtatttgtccttctcgaagca

SEQ ID NO: 5255 - RNA, 23 nt, synthetic construct
  source 1..23: mol_type = other RNA
  modified_base 1: mod_base = OTHER; note = 2'-O-methyluridine-3'-phosphate 5'phosphate
  modified_base 2: mod_base = OTHER; note = 2'-deoxy-2'-fluoroadenosine-3'-phosphate
  modified_base 3: mod_base = OTHER; note = 2'-O-methyluridine-3'-phosphate
  modified_base 4: mod_base = OTHER; note = 2'-O-methylguanosine-3'-phosphate
  modified_base 5: mod_base = OTHER; note = 2'-O-methyluridine-3'-phosphate
  modified_base 6: mod_base = OTHER; note = 2'-deoxy-2'-fluoroadenosine-3'-phosphate
  modified_base 7: mod_base = OTHER; note = 2'-O-methyluridine-3'-phosphate
  modified_base 8: mod_base = OTHER; note = 2'-O-methyluridine-3'-phosphate
  modified_base 9: mod_base = OTHER; note = 2'-O-methyluridine-3'-phosphate
  modified_base 10: mod_base = OTHER; note = 2'-O-methylguanosine-3'-phosphate
  modified_base 11: mod_base = OTHER; note = 2'-O-methyluridine-3'-phosphate
  modified_base 12: mod_base = OTHER; note = 2'-O-methylcytidine-3'-phosphate
  modified_base 13: mod_base = OTHER; note = 2'-O-methylcytidine-3'-phosphate
  modified_base 14: mod_base = OTHER; note = 2'-deoxy-2'-fluorouridine-3'-phosphate
  modified_base 15: mod_base = OTHER; note = 2'-O-methyluridine-3'-phosphate
  modified_base 16: mod_base = OTHER; note = 2'-deoxy-2'-fluorocytidine-3'-phosphate
  modified_base 17: mod_base = OTHER; note = 2'-O-methyluridine-3'-phosphate
  modified_base 18: mod_base = OTHER; note = 2'-O-methylcytidine-3'-phosphate
  modified_base 19: mod_base = OTHER; note = 2'-O-methylguanosine-3'-phosphate
  modified_base 20: mod_base = OTHER; note = 2'-O-methyladenosine-3'-phosphate
  modified_base 21: mod_base = OTHER; note = 2'-O-methyladenosine-3'-phosphate
  modified_base 22: mod_base = OTHER; note = 2'-O-methylguanosine-3'-phosphate
  modified_base 23: mod_base = OTHER; note = 2'-O-methylcytidine
tatgtatttgtccttctcgaagc

SEQ ID NO: 5256 - RNA, 23 nt, synthetic construct
  source 1..23: mol_type = other RNA
  modified_base 1: mod_base = OTHER; note = 2'-O-methyluridine-3'-phosphate 5'phosphate
  modified_base 2: mod_base = OTHER; note = 2'-deoxy-2'-fluoroadenosine-3'-phosphate
  modified_base 3: mod_base = OTHER; note = 2'-O-methyladenosine-3'-phosphate
  modified_base 4: mod_base = OTHER; note = 2'-O-methyluridine-3'-phosphate
  modified_base 5: mod_base = OTHER; note = 2'-O-methylguanosine-3'-phosphate
  modified_base 6: mod_base = OTHER; note = 2'-deoxy-2'-fluorouridine-3'-phosphate
  modified_base 7: mod_base = OTHER; note = 2'-O-methyladenosine-3'-phosphate
  modified_base 8: mod_base = OTHER; note = 2'-O-methyluridine-3'-phosphate
  modified_base 9: mod_base = OTHER; note = 2'-O-methyluridine-3'-phosphate
  modified_base 10: mod_base = OTHER; note = 2'-O-methyluridine-3'-phosphate
  modified_base 11: mod_base = OTHER; note = 2'-O-methylguanosine-3'-phosphate
  modified_base 12: mod_base = OTHER; note = 2'-O-methyluridine-3'-phosphate
  modified_base 13: mod_base = OTHER; note = 2'-O-methylcytidine-3'-phosphate
  modified_base 14: mod_base = OTHER; note = 2'-deoxy-2'-fluorocytidine-3'-phosphate
  modified_base 15: mod_base = OTHER; note = 2'-O-methyluridine-3'-phosphate
  modified_base 16: mod_base = OTHER; note = 2'-deoxy-2'-fluorouridine-3'-phosphate
  modified_base 17: mod_base = OTHER; note = 2'-O-methylcytidine-3'-phosphate
  modified_base 18: mod_base = OTHER; note = 2'-O-methyluridine-3'-phosphate
  modified_base 19: mod_base = OTHER; note = 2'-O-methylcytidine-3'-phosphate
  modified_base 20: mod_base = OTHER; note = 2'-O-methylguanosine-3'-phosphate
  modified_base 21: mod_base = OTHER; note = 2'-O-methyladenosine-3'-phosphate
  modified_base 22: mod_base = OTHER; note = 2'-O-methyladenosine-3'-phosphate
  modified_base 23: mod_base = OTHER; note = 2'-O-methylguanosine
taatgtatttgtccttctcgaag

SEQ ID NO: 5257 - RNA, 23 nt, synthetic construct
  source 1..23: mol_type = other RNA
  modified_base 1: mod_base = OTHER; note = 2'-O-methyluridine-3'-phosphate 5'phosphate
  modified_base 2: mod_base = OTHER; note = 2'-deoxy-2'-fluoroadenosine-3'-phosphate
  modified_base 3: mod_base = OTHER; note = 2'-O-methyladenosine-3'-phosphate
  modified_base 4: mod_base = OTHER; note = 2'-O-methyladenosine-3'-phosphate
  modified_base 5: mod_base = OTHER; note = 2'-O-methyluridine-3'-phosphate
  modified_base 6: mod_base = OTHER; note = 2'-deoxy-2'-fluoroguanosine-3'-phosphate
  modified_base 7: mod_base = OTHER; note = 2'-O-methyluridine-3'-phosphate
  modified_base 8: mod_base = OTHER; note = 2'-O-methyladenosine-3'-phosphate
  modified_base 9: mod_base = OTHER; note = 2'-O-methyluridine-3'-phosphate
  modified_base 10: mod_base = OTHER; note = 2'-O-methyluridine-3'-phosphate
  modified_base 11: mod_base = OTHER; note = 2'-O-methyluridine-3'-phosphate
  modified_base 12: mod_base = OTHER; note = 2'-O-methylguanosine-3'-phosphate
  modified_base 13: mod_base = OTHER; note = 2'-O-methyluridine-3'-phosphate
  modified_base 14: mod_base = OTHER; note = 2'-deoxy-2'-fluorocytidine-3'-phosphate
  modified_base 15: mod_base = OTHER; note = 2'-O-methylcytidine-3'-phosphate
  modified_base 16: mod_base = OTHER; note = 2'-deoxy-2'-fluorouridine-3'-phosphate
  modified_base 17: mod_base = OTHER; note = 2'-O-methyluridine-3'-phosphate
  modified_base 18: mod_base = OTHER; note = 2'-O-methylcytidine-3'-phosphate
  modified_base 19: mod_base = OTHER; note = 2'-O-methyluridine-3'-phosphate
  modified_base 20: mod_base = OTHER; note = 2'-O-methylcytidine-3'-phosphate
  modified_base 21: mod_base = OTHER; note = 2'-O-methylguanosine-3'-phosphate
  modified_base 22: mod_base = OTHER; note = 2'-O-methyladenosine-3'-phosphate
  modified_base 23: mod_base = OTHER; note = 2'-O-methyladenosine
taaatgtatttgtccttctcgaa

SEQ ID NO: 5258 - RNA, 23 nt, synthetic construct
  source 1..23: mol_type = other RNA
  modified_base 1: mod_base = OTHER; note = 2'-O-methyluridine-3'-phosphate 5'phosphate
  modified_base 2: mod_base = OTHER; note = 2'-deoxy-2'-fluoroadenosine-3'-phosphate
  modified_base 3: mod_base = OTHER; note = 2'-O-methyladenosine-3'-phosphate
  modified_base 4: mod_base = OTHER; note = 2'-O-methyladenosine-3'-phosphate
  modified_base 5: mod_base = OTHER; note = 2'-O-methyladenosine-3'-phosphate
  modified_base 6: mod_base = OTHER; note = 2'-deoxy-2'-fluorouridine-3'-phosphate
  modified_base 7: mod_base = OTHER; note = 2'-O-methylguanosine-3'-phosphate
  modified_base 8: mod_base = OTHER; note = 2'-O-methyluridine-3'-phosphate
  modified_base 9: mod_base = OTHER; note = 2'-O-methyladenosine-3'-phosphate
  modified_base 10: mod_base = OTHER; note = 2'-O-methyluridine-3'-phosphate
  modified_base 11: mod_base = OTHER; note = 2'-O-methyluridine-3'-phosphate
  modified_base 12: mod_base = OTHER; note = 2'-O-methyluridine-3'-phosphate
  modified_base 13: mod_base = OTHER; note = 2'-O-methylguanosine-3'-phosphate
  modified_base 14: mod_base = OTHER; note = 2'-deoxy-2'-fluorouridine-3'-phosphate
  modified_base 15: mod_base = OTHER; note = 2'-O-methylcytidine-3'-phosphate
  modified_base 16: mod_base = OTHER; note = 2'-deoxy-2'-fluorocytidine-3'-phosphate
  modified_base 17: mod_base = OTHER; note = 2'-O-methyluridine-3'-phosphate
  modified_base 18: mod_base = OTHER; note = 2'-O-methyluridine-3'-phosphate
  modified_base 19: mod_base = OTHER; note = 2'-O-methylcytidine-3'-phosphate
  modified_base 20: mod_base = OTHER; note = 2'-O-methyluridine-3'-phosphate
  modified_base 21: mod_base = OTHER; note = 2'-O-methylcytidine-3'-phosphate
  modified_base 22: mod_base = OTHER; note = 2'-O-methylguanosine-3'-phosphate
  modified_base 23: mod_base = OTHER; note = 2'-O-methyladenosine
taaaatgtatttgtccttctcga

SEQ ID NO: 5259 - RNA, 23 nt, synthetic construct
  source 1..23: mol_type = other RNA
  modified_base 1: mod_base = OTHER; note = 2'-O-methyluridine-3'-phosphate 5'phosphate
  modified_base 2: mod_base = OTHER; note = 2'-deoxy-2'-fluorouridine-3'-phosphate
  modified_base 3: mod_base = OTHER; note = 2'-O-methyladenosine-3'-phosphate
  modified_base 4: mod_base = OTHER; note = 2'-O-methyladenosine-3'-phosphate
  modified_base 5: mod_base = OTHER; note = 2'-O-methyladenosine-3'-phosphate
  modified_base 6: mod_base = OTHER; note = 2'-deoxy-2'-fluoroadenosine-3'-phosphate
  modified_base 7: mod_base = OTHER; note = 2'-O-methyluridine-3'-phosphate
  modified_base 8: mod_base = OTHER; note = 2'-O-methylguanosine-3'-phosphate
  modified_base 9: mod_base = OTHER; note = 2'-O-methyluridine-3'-phosphate
  modified_base 10: mod_base = OTHER; note = 2'-O-methyladenosine-3'-phosphate
  modified_base 11: mod_base = OTHER; note = 2'-O-methyluridine-3'-phosphate
  modified_base 12: mod_base = OTHER; note = 2'-O-methyluridine-3'-phosphate
  modified_base 13: mod_base = OTHER; note = 2'-O-methyluridine-3'-phosphate
  modified_base 14: mod_base = OTHER; note = 2'-deoxy-2'-fluoroguanosine-3'-phosphate
  modified_base 15: mod_base = OTHER; note = 2'-O-methyluridine-3'-phosphate
  modified_base 16: mod_base = OTHER; note = 2'-deoxy-2'-fluorocytidine-3'-phosphate
  modified_base 17: mod_base = OTHER; note = 2'-O-methylcytidine-3'-phosphate
  modified_base 18: mod_base = OTHER; note = 2'-O-methyluridine-3'-phosphate
  modified_base 19: mod_base = OTHER; note = 2'-O-methyluridine-3'-phosphate
  modified_base 20: mod_base = OTHER; note = 2'-O-methylcytidine-3'-phosphate
  modified_base 21: mod_base = OTHER; note = 2'-O-methyluridine-3'-phosphate
  modified_base 22: mod_base = OTHER; note = 2'-O-methylcytidine-3'-phosphate
  modified_base 23: mod_base = OTHER; note = 2'-O-methylguanosine
ttaaaatgtatttgtccttctcg

SEQ ID NO: 5260 - RNA, 23 nt, synthetic construct
  source 1..23: mol_type = other RNA
  modified_base 1: mod_base = OTHER; note = 2'-O-methyluridine-3'-phosphate 5'phosphate
  modified_base 2: mod_base = OTHER; note = 2'-deoxy-2'-fluoroguanosine-3'-phosphate
  modified_base 3: mod_base = OTHER; note = 2'-O-methyluridine-3'-phosphate
  modified_base 4: mod_base = OTHER; note = 2'-O-methyladenosine-3'-phosphate
  modified_base 5: mod_base = OTHER; note = 2'-O-methyladenosine-3'-phosphate
  modified_base 6: mod_base = OTHER; note = 2'-deoxy-2'-fluoroadenosine-3'-phosphate
  modified_base 7: mod_base = OTHER; note = 2'-O-methyladenosine-3'-phosphate
  modified_base 8: mod_base = OTHER; note = 2'-O-methyluridine-3'-phosphate
  modified_base 9: mod_base = OTHER; note = 2'-O-methylguanosine-3'-phosphate
  modified_base 10: mod_base = OTHER; note = 2'-O-methyluridine-3'-phosphate
  modified_base 11: mod_base = OTHER; note = 2'-O-methyladenosine-3'-phosphate
  modified_base 12: mod_base = OTHER; note = 2'-O-methyluridine-3'-phosphate
  modified_base 13: mod_base = OTHER; note = 2'-O-methyluridine-3'-phosphate
  modified_base 14: mod_base = OTHER; note = 2'-deoxy-2'-fluorouridine-3'-phosphate
  modified_base 15: mod_base = OTHER; note = 2'-O-methylguanosine-3'-phosphate
  modified_base 16: mod_base = OTHER; note = 2'-deoxy-2'-fluorouridine-3'-phosphate
  modified_base 17: mod_base = OTHER; note = 2'-O-methylcytidine-3'-phosphate
  modified_base 18: mod_base = OTHER; note = 2'-O-methylcytidine-3'-phosphate
  modified_base 19: mod_base = OTHER; note = 2'-O-methyluridine-3'-phosphate
  modified_base 20: mod_base = OTHER; note = 2'-O-methyluridine-3'-phosphate
  modified_base 21: mod_base = OTHER; note = 2'-O-methylcytidine-3'-phosphate
  modified_base 22: mod_base = OTHER; note = 2'-O-methyluridine-3'-phosphate
  modified_base 23: mod_base = OTHER; note = 2'-O-methylcytidine
tgtaaaatgtatttgtccttctc

SEQ ID NO: 5261 - RNA, 23 nt, synthetic construct
  source 1..23: mol_type = other RNA
  modified_base 1: mod_base = OTHER; note = 2'-O-methyluridine-3'-phosphate 5'phosphate
  modified_base 2: mod_base = OTHER; note = 2'-deoxy-2'-fluorouridine-3'-phosphate
  modified_base 3: mod_base = OTHER; note = 2'-O-methylguanosine-3'-phosphate
  modified_base 4: mod_base = OTHER; note = 2'-O-methyluridine-3'-phosphate
  modified_base 5: mod_base = OTHER; note = 2'-O-methyladenosine-3'-phosphate
  modified_base 6: mod_base = OTHER; note = 2'-deoxy-2'-fluoroadenosine-3'-phosphate
  modified_base 7: mod_base = OTHER; note = 2'-O-methyladenosine-3'-phosphate
  modified_base 8: mod_base = OTHER; note = 2'-O-methyladenosine-3'-phosphate
  modified_base 9: mod_base = OTHER; note = 2'-O-methyluridine-3'-phosphate
  modified_base 10: mod_base = OTHER; note = 2'-O-methylguanosine-3'-phosphate
  modified_base 11: mod_base = OTHER; note = 2'-O-methyluridine-3'-phosphate
  modified_base 12: mod_base = OTHER; note = 2'-O-methyladenosine-3'-phosphate
  modified_base 13: mod_base = OTHER; note = 2'-O-methyluridine-3'-phosphate
  modified_base 14: mod_base = OTHER; note = 2'-deoxy-2'-fluorouridine-3'-phosphate
  modified_base 15: mod_base = OTHER; note = 2'-O-methyluridine-3'-phosphate
  modified_base 16: mod_base = OTHER; note = 2'-deoxy-2'-fluoroguanosine-3'-phosphate
  modified_base 17: mod_base = OTHER; note = 2'-O-methyluridine-3'-phosphate
  modified_base 18: mod_base = OTHER; note = 2'-O-methylcytidine-3'-phosphate
  modified_base 19: mod_base = OTHER; note = 2'-O-methylcytidine-3'-phosphate
  modified_base 20: mod_base = OTHER; note = 2'-O-methyluridine-3'-phosphate
  modified_base 21: mod_base = OTHER; note = 2'-O-methyluridine-3'-phosphate
  modified_base 22: mod_base = OTHER; note = 2'-O-methylcytidine-3'-phosphate
  modified_base 23: mod_base = OTHER; note = 2'-O-methyluridine
ttgtaaaatgtatttgtccttct

SEQ ID NO: 5262 - RNA, 23 nt, synthetic construct
  source 1..23: mol_type = other RNA
  modified_base 1: mod_base = OTHER; note = 2'-O-methyluridine-3'-phosphate 5'phosphate
  modified_base 2: mod_base = OTHER; note = 2'-deoxy-2'-fluorouridine-3'-phosphate
  modified_base 3: mod_base = OTHER; note = 2'-O-methyluridine-3'-phosphate
  modified_base 4: mod_base = OTHER; note = 2'-O-methylguanosine-3'-phosphate
  modified_base 5: mod_base = OTHER; note = 2'-O-methyluridine-3'-phosphate
  modified_base 6: mod_base = OTHER; note = 2'-deoxy-2'-fluoroadenosine-3'-phosphate
  modified_base 7: mod_base = OTHER; note = 2'-O-methyladenosine-3'-phosphate
  modified_base 8: mod_base = OTHER; note = 2'-O-methyladenosine-3'-phosphate
  modified_base 9: mod_base = OTHER; note = 2'-O-methyladenosine-3'-phosphate
  modified_base 10: mod_base = OTHER; note = 2'-O-methyluridine-3'-phosphate
  modified_base 11: mod_base = OTHER; note = 2'-O-methylguanosine-3'-phosphate
  modified_base 12: mod_base = OTHER; note = 2'-O-methyluridine-3'-phosphate
  modified_base 13: mod_base = OTHER; note = 2'-O-methyladenosine-3'-phosphate
  modified_base 14: mod_base = OTHER; note = 2'-deoxy-2'-fluorouridine-3'-phosphate
  modified_base 15: mod_base = OTHER; note = 2'-O-methyluridine-3'-phosphate
  modified_base 16: mod_base = OTHER; note = 2'-deoxy-2'-fluorouridine-3'-phosphate
  modified_base 17: mod_base = OTHER; note = 2'-O-methylguanosine-3'-phosphate
  modified_base 18: mod_base = OTHER; note = 2'-O-methyluridine-3'-phosphate
  modified_base 19: mod_base = OTHER; note = 2'-O-methylcytidine-3'-phosphate
  modified_base 20: mod_base = OTHER; note = 2'-O-methylcytidine-3'-phosphate
  modified_base 21: mod_base = OTHER; note = 2'-O-methyluridine-3'-phosphate
  modified_base 22: mod_base = OTHER; note = 2'-O-methyluridine-3'-phosphate
  modified_base 23: mod_base = OTHER; note = 2'-O-methylcytidine
tttgtaaaatgtatttgtccttc

SEQ ID NO: 5263 - RNA, 23 nt, synthetic construct
  source 1..23: mol_type = other RNA
  modified_base 1: mod_base = OTHER; note = 2'-O-methyluridine-3'-phosphate 5'phosphate
  modified_base 2: mod_base = OTHER; note = 2'-deoxy-2'-fluorocytidine-3'-phosphate
  modified_base 3: mod_base = OTHER; note = 2'-O-methyluridine-3'-phosphate
  modified_base 4: mod_base = OTHER; note = 2'-O-methyluridine-3'-phosphate
  modified_base 5: mod_base = OTHER; note = 2'-O-methylguanosine-3'-phosphate
  modified_base 6: mod_base = OTHER; note = 2'-deoxy-2'-fluorouridine-3'-phosphate
  modified_base 7: mod_base = OTHER; note = 2'-O-methyladenosine-3'-phosphate
  modified_base 8: mod_base = OTHER; note = 2'-O-methyladenosine-3'-phosphate
  modified_base 9: mod_base = OTHER; note = 2'-O-methyladenosine-3'-phosphate
  modified_base 10: mod_base = OTHER; note = 2'-O-methyladenosine-3'-phosphate
  modified_base 11: mod_base = OTHER; note = 2'-O-methyluridine-3'-phosphate
  modified_base 12: mod_base = OTHER; note = 2'-O-methylguanosine-3'-phosphate
  modified_base 13: mod_base = OTHER; note = 2'-O-methyluridine-3'-phosphate
  modified_base 14: mod_base = OTHER; note = 2'-deoxy-2'-fluoroadenosine-3'-phosphate
  modified_base 15: mod_base = OTHER; note = 2'-O-methyluridine-3'-phosphate
  modified_base 16: mod_base = OTHER; note = 2'-deoxy-2'-fluorouridine-3'-phosphate
  modified_base 17: mod_base = OTHER; note = 2'-O-methyluridine-3'-phosphate
  modified_base 18: mod_base = OTHER; note = 2'-O-methylguanosine-3'-phosphate
  modified_base 19: mod_base = OTHER; note = 2'-O-methyluridine-3'-phosphate
  modified_base 20: mod_base = OTHER; note = 2'-O-methylcytidine-3'-phosphate
  modified_base 21: mod_base = OTHER; note = 2'-O-methylcytidine-3'-phosphate
  modified_base 22: mod_base = OTHER; note = 2'-O-methyluridine-3'-phosphate
  modified_base 23: mod_base = OTHER; note = 2'-O-methyluridine
tcttgtaaaatgtatttgtcctt

SEQ ID NO: 5264 - RNA, 23 nt, synthetic construct
  source 1..23: mol_type = other RNA
  modified_base 1: mod_base = OTHER; note = 2'-O-methyluridine-3'-phosphate 5'phosphate
  modified_base 2: mod_base = OTHER; note = 2'-deoxy-2'-fluorocytidine-3'-phosphate
  modified_base 3: mod_base = OTHER; note = 2'-O-methylcytidine-3'-phosphate
  modified_base 4: mod_base = OTHER; note = 2'-O-methyluridine-3'-phosphate
  modified_base 5: mod_base = OTHER; note = 2'-O-methyluridine-3'-phosphate
  modified_base 6: mod_base = OTHER; note = 2'-deoxy-2'-fluoroguanosine-3'-phosphate
  modified_base 7: mod_base = OTHER; note = 2'-O-methyluridine-3'-phosphate
  modified_base 8: mod_base = OTHER; note = 2'-O-methyladenosine-3'-phosphate
  modified_base 9: mod_base = OTHER; note = 2'-O-methyladenosine-3'-phosphate
  modified_base 10: mod_base = OTHER; note = 2'-O-methyladenosine-3'-phosphate
  modified_base 11: mod_base = OTHER; note = 2'-O-methyladenosine-3'-phosphate
  modified_base 12: mod_base = OTHER; note = 2'-O-methyluridine-3'-phosphate
  modified_base 13: mod_base = OTHER; note = 2'-O-methylguanosine-3'-phosphate
  modified_base 14: mod_base = OTHER; note = 2'-deoxy-2'-fluorouridine-3'-phosphate
  modified_base 15: mod_base = OTHER; note = 2'-O-methyladenosine-3'-phosphate
  modified_base 16: mod_base = OTHER; note = 2'-deoxy-2'-fluorouridine-3'-phosphate
  modified_base 17: mod_base = OTHER; note = 2'-O-methyluridine-3'-phosphate
  modified_base 18: mod_base = OTHER; note = 2'-O-methyluridine-3'-phosphate
  modified_base 19: mod_base = OTHER; note = 2'-O-methylguanosine-3'-phosphate
  modified_base 20: mod_base = OTHER; note = 2'-O-methyluridine-3'-phosphate
  modified_base 21: mod_base = OTHER; note = 2'-O-methylcytidine-3'-phosphate
  modified_base 22: mod_base = OTHER; note = 2'-O-methylcytidine-3'-phosphate
  modified_base 23: mod_base = OTHER; note = 2'-O-methyluridine
tccttgtaaaatgtatttgtcct

SEQ ID NO: 5265 - RNA, 23 nt, synthetic construct
  source 1..23: mol_type = other RNA
  modified_base 1: mod_base = OTHER; note = 2'-O-methyluridine-3'-phosphate 5'phosphate
  modified_base 2: mod_base = OTHER; note = 2'-deoxy-2'-fluorouridine-3'-phosphate
  modified_base 3: mod_base = OTHER; note = 2'-O-methylcytidine-3'-phosphate
  modified_base 4: mod_base = OTHER; note = 2'-O-methylcytidine-3'-phosphate
  modified_base 5: mod_base = OTHER; note = 2'-O-methyluridine-3'-phosphate
  modified_base 6: mod_base = OTHER; note = 2'-deoxy-2'-fluorouridine-3'-phosphate
  modified_base 7: mod_base = OTHER; note = 2'-O-methylguanosine-3'-phosphate
  modified_base 8: mod_base = OTHER; note = 2'-O-methyluridine-3'-phosphate
  modified_base 9: mod_base = OTHER; note = 2'-O-methyladenosine-3'-phosphate
  modified_base 10: mod_base = OTHER; note = 2'-O-methyladenosine-3'-phosphate
  modified_base 11: mod_base = OTHER; note = 2'-O-methyladenosine-3'-phosphate
  modified_base 12: mod_base = OTHER; note = 2'-O-methyladenosine-3'-phosphate
  modified_base 13: mod_base = OTHER; note = 2'-O-methyluridine-3'-phosphate
  modified_base 14: mod_base = OTHER; note = 2'-deoxy-2'-fluoroguanosine-3'-phosphate
  modified_base 15: mod_base = OTHER; note = 2'-O-methyluridine-3'-phosphate
  modified_base 16: mod_base = OTHER; note = 2'-deoxy-2'-fluoroadenosine-3'-phosphate
  modified_base 17: mod_base = OTHER; note = 2'-O-methyluridine-3'-phosphate
  modified_base 18: mod_base = OTHER; note = 2'-O-methyluridine-3'-phosphate
  modified_base 19: mod_base = OTHER; note = 2'-O-methyluridine-3'-phosphate
  modified_base 20: mod_base = OTHER; note = 2'-O-methylguanosine-3'-phosphate
  modified_base 21: mod_base = OTHER; note = 2'-O-methyluridine-3'-phosphate
  modified_base 22: mod_base = OTHER; note = 2'-O-methylcytidine-3'-phosphate
  modified_base 23: mod_base = OTHER; note = 2'-O-methylcytidine
ttccttgtaaaatgtatttgtcc

SEQ ID NO: 5266 - RNA, 23 nt, synthetic construct
  source 1..23: mol_type = other RNA
  modified_base 1: mod_base = OTHER; note = 2'-O-methyluridine-3'-phosphate 5'phosphate
  modified_base 2: mod_base = OTHER; note = 2'-deoxy-2'-fluoroadenosine-3'-phosphate
  modified_base 3: mod_base = OTHER; note = 2'-O-methylcytidine-3'-phosphate
  modified_base 4: mod_base = OTHER; note = 2'-O-methyladenosine-3'-phosphate
  modified_base 5: mod_base = OTHER; note = 2'-O-methyluridine-3'-phosphate
  modified_base 6: mod_base = OTHER; note = 2'-deoxy-2'-fluoroadenosine-3'-phosphate
  modified_base 7: mod_base = OTHER; note = 2'-O-methylguanosine-3'-phosphate
  modified_base 8: mod_base = OTHER; note = 2'-O-methyladenosine-3'-phosphate
  modified_base 9: mod_base = OTHER; note = 2'-O-methylcytidine-3'-phosphate
  modified_base 10: mod_base = OTHER; note = 2'-O-methyladenosine-3'-phosphate
  modified_base 11: mod_base = OTHER; note = 2'-O-methylcytidine-3'-phosphate
  modified_base 12: mod_base = OTHER; note = 2'-O-methylcytidine-3'-phosphate
  modified_base 13: mod_base = OTHER; note = 2'-O-methyladenosine-3'-phosphate
  modified_base 14: mod_base = OTHER; note = 2'-deoxy-2'-fluoroguanosine-3'-phosphate
  modified_base 15: mod_base = OTHER; note = 2'-O-methylguanosine-3'-phosphate
  modified_base 16: mod_base = OTHER; note = 2'-deoxy-2'-fluorocytidine-3'-phosphate
  modified_base 17: mod_base = OTHER; note = 2'-O-methyluridine-3'-phosphate
  modified_base 18: mod_base = OTHER; note = 2'-O-methyluridine-3'-phosphate
  modified_base 19: mod_base = OTHER; note = 2'-O-methyladenosine-3'-phosphate
  modified_base 20: mod_base = OTHER; note = 2'-O-methyluridine-3'-phosphate
  modified_base 21: mod_base = OTHER; note = 2'-O-methyluridine-3'-phosphate
  modified_base 22: mod_base = OTHER; note = 2'-O-methylguanosine-3'-phosphate
  modified_base 23: mod_base = OTHER; note = 2'-O-methylguanosine
tacatagacaccaggcttattgg

SEQ ID NO: 5267 - RNA, 23 nt, synthetic construct
  source 1..23: mol_type = other RNA
  modified_base 1: mod_base = OTHER; note = 2'-O-methyluridine-3'-phosphate 5'phosphate
  modified_base 2: mod_base = OTHER; note = 2'-deoxy-2'-fluoroadenosine-3'-phosphate
  modified_base 3: mod_base = OTHER; note = 2'-O-methyladenosine-3'-phosphate
  modified_base 4: mod_base = OTHER; note = 2'-O-methylcytidine-3'-phosphate
  modified_base 5: mod_base = OTHER; note = 2'-O-methyladenosine-3'-phosphate
  modified_base 6: mod_base = OTHER; note = 2'-deoxy-2'-fluorouridine-3'-phosphate
  modified_base 7: mod_base = OTHER; note = 2'-O-methyladenosine-3'-phosphate
  modified_base 8: mod_base = OTHER; note = 2'-O-methylguanosine-3'-phosphate
  modified_base 9: mod_base = OTHER; note = 2'-O-methyladenosine-3'-phosphate
  modified_base 10: mod_base = OTHER; note = 2'-O-methylcytidine-3'-phosphate
  modified_base 11: mod_base = OTHER; note = 2'-O-methyladenosine-3'-phosphate
  modified_base 12: mod_base = OTHER; note = 2'-O-methylcytidine-3'-phosphate
  modified_base 13: mod_base = OTHER; note = 2'-O-methylcytidine-3'-phosphate
  modified_base 14: mod_base = OTHER; note = 2'-deoxy-2'-fluoroadenosine-3'-phosphate
  modified_base 15: mod_base = OTHER; note = 2'-O-methylguanosine-3'-phosphate
  modified_base 16: mod_base = OTHER; note = 2'-deoxy-2'-fluoroguanosine-3'-phosphate
  modified_base 17: mod_base = OTHER; note = 2'-O-methylcytidine-3'-phosphate
  modified_base 18: mod_base = OTHER; note = 2'-O-methyluridine-3'-phosphate
  modified_base 19: mod_base = OTHER; note = 2'-O-methyluridine-3'-phosphate
  modified_base 20: mod_base = OTHER; note = 2'-O-methyladenosine-3'-phosphate
  modified_base 21: mod_base = OTHER; note = 2'-O-methyluridine-3'-phosphate
  modified_base 22: mod_base = OTHER; note = 2'-O-methyluridine-3'-phosphate
  modified_base 23: mod_base = OTHER; note = 2'-O-methylguanosine
taacatagacaccaggcttattg

SEQ ID NO: 5268 - RNA, 23 nt, synthetic construct
  source 1..23: mol_type = other RNA
  modified_base 1: mod_base = OTHER; note = 2'-O-methyluridine-3'-phosphate 5'phosphate
  modified_base 2: mod_base = OTHER; note = 2'-deoxy-2'-fluoroguanosine-3'-phosphate
  modified_base 3: mod_base = OTHER; note = 2'-O-methyladenosine-3'-phosphate
  modified_base 4: mod_base = OTHER; note = 2'-O-methyladenosine-3'-phosphate
  modified_base 5: mod_base = OTHER; note = 2'-O-methylcytidine-3'-phosphate
  modified_base 6: mod_base = OTHER; note = 2'-deoxy-2'-fluoroadenosine-3'-phosphate
  modified_base 7: mod_base = OTHER; note = 2'-O-methyluridine-3'-phosphate
  modified_base 8: mod_base = OTHER; note = 2'-O-methyladenosine-3'-phosphate
  modified_base 9: mod_base = OTHER; note = 2'-O-methylguanosine-3'-phosphate
  modified_base 10: mod_base = OTHER; note = 2'-O-methyladenosine-3'-phosphate
  modified_base 11: mod_base = OTHER; note = 2'-O-methylcytidine-3'-phosphate
  modified_base 12: mod_base = OTHER; note = 2'-O-methyladenosine-3'-phosphate
  modified_base 13: mod_base = OTHER; note = 2'-O-methylcytidine-3'-phosphate
  modified_base 14: mod_base = OTHER; note = 2'-deoxy-2'-fluorocytidine-3'-phosphate
  modified_base 15: mod_base = OTHER; note = 2'-O-methyladenosine-3'-phosphate
  modified_base 16: mod_base = OTHER; note = 2'-deoxy-2'-fluoroguanosine-3'-phosphate
  modified_base 17: mod_base = OTHER; note = 2'-O-methylguanosine-3'-phosphate
  modified_base 18: mod_base = OTHER; note = 2'-O-methylcytidine-3'-phosphate
  modified_base 19: mod_base = OTHER; note = 2'-O-methyluridine-3'-phosphate
  modified_base 20: mod_base = OTHER; note = 2'-O-methyluridine-3'-phosphate
  modified_base 21: mod_base = OTHER; note = 2'-O-methyladenosine-3'-phosphate
  modified_base 22: mod_base = OTHER; note = 2'-O-methyluridine-3'-phosphate
  modified_base 23: mod_base = OTHER; note = 2'-O-methyluridine
tgaacatagacaccaggcttatt

SEQ ID NO: 5269 - RNA, 23 nt, synthetic construct
  source 1..23: mol_type = other RNA
  modified_base 1: mod_base = OTHER; note = 2'-O-methyluridine-3'-phosphate 5'phosphate
  modified_base 2: mod_base = OTHER; note = 2'-deoxy-2'-fluoroadenosine-3'-phosphate
  modified_base 3: mod_base = OTHER; note = 2'-O-methylcytidine-3'-phosphate
  modified_base 4: mod_base = OTHER; note = 2'-O-methylguanosine-3'-phosphate
  modified_base 5: mod_base = OTHER; note = 2'-O-methyladenosine-3'-phosphate
  modified_base 6: mod_base = OTHER; note = 2'-deoxy-2'-fluoroadenosine-3'-phosphate
  modified_base 7: mod_base = OTHER; note = 2'-O-methylcytidine-3'-phosphate
  modified_base 8: mod_base = OTHER; note = 2'-O-methyladenosine-3'-phosphate
  modified_base 9: mod_base = OTHER; note = 2'-O-methyluridine-3'-phosphate
  modified_base 10: mod_base = OTHER; note = 2'-O-methyladenosine-3'-phosphate
  modified_base 11: mod_base = OTHER; note = 2'-O-methylguanosine-3'-phosphate
  modified_base 12: mod_base = OTHER; note = 2'-O-methyladenosine-3'-phosphate
  modified_base 13: mod_base = OTHER; note = 2'-O-methylcytidine-3'-phosphate
  modified_base 14: mod_base = OTHER; note = 2'-deoxy-2'-fluoroadenosine-3'-phosphate
  modified_base 15: mod_base = OTHER; note = 2'-O-methylcytidine-3'-phosphate
  modified_base 16: mod_base = OTHER; note = 2'-deoxy-2'-fluorocytidine-3'-phosphate
  modified_base 17: mod_base = OTHER; note = 2'-O-methyladenosine-3'-phosphate
  modified_base 18: mod_base = OTHER; note = 2'-O-methylguanosine-3'-phosphate
  modified_base 19: mod_base = OTHER; note = 2'-O-methylguanosine-3'-phosphate
  modified_base 20: mod_base = OTHER; note = 2'-O-methylcytidine-3'-phosphate
  modified_base 21: mod_base = OTHER; note = 2'-O-methyluridine-3'-phosphate
  modified_base 22: mod_base = OTHER; note = 2'-O-methyluridine-3'-phosphate
  modified_base 23: mod_base = OTHER; note = 2'-O-methyladenosine
tacgaacatagacaccaggctta

SEQ ID NO: 5270 - RNA, 23 nt, synthetic construct
  source 1..23: mol_type = other RNA
  modified_base 1: mod_base = OTHER; note = 2'-O-methyluridine-3'-phosphate 5'phosphate
  modified_base 2: mod_base = OTHER; note = 2'-deoxy-2'-fluoroadenosine-3'-phosphate
  modified_base 3: mod_base = OTHER; note = 2'-O-methylcytidine-3'-phosphate
  modified_base 4: mod_base = OTHER; note = 2'-O-methyladenosine-3'-phosphate
  modified_base 5: mod_base = OTHER; note = 2'-O-methylcytidine-3'-phosphate
  modified_base 6: mod_base = OTHER; note = 2'-deoxy-2'-fluoroguanosine-3'-phosphate
  modified_base 7: mod_base = OTHER; note = 2'-O-methyladenosine-3'-phosphate
  modified_base 8: mod_base = OTHER; note = 2'-O-methyladenosine-3'-phosphate
  modified_base 9: mod_base = OTHER; note = 2'-O-methylcytidine-3'-phosphate
  modified_base 10: mod_base = OTHER; note = 2'-O-methyladenosine-3'-phosphate
  modified_base 11: mod_base = OTHER; note = 2'-O-methyluridine-3'-phosphate
  modified_base 12: mod_base = OTHER; note = 2'-O-methyladenosine-3'-phosphate
  modified_base 13: mod_base = OTHER; note = 2'-O-methylguanosine-3'-phosphate
  modified_base 14: mod_base = OTHER; note = 2'-deoxy-2'-fluoroadenosine-3'-phosphate
  modified_base 15: mod_base = OTHER; note = 2'-O-methylcytidine-3'-phosphate
  modified_base 16: mod_base = OTHER; note = 2'-deoxy-2'-fluoroadenosine-3'-phosphate
  modified_base 17: mod_base = OTHER; note = 2'-O-methylcytidine-3'-phosphate
  modified_base 18: mod_base = OTHER; note = 2'-O-methylcytidine-3'-phosphate
  modified_base 19: mod_base = OTHER; note = 2'-O-methyladenosine-3'-phosphate
  modified_base 20: mod_base = OTHER; note = 2'-O-methylguanosine-3'-phosphate
  modified_base 21: mod_base = OTHER; note = 2'-O-methylguanosine-3'-phosphate
  modified_base 22: mod_base = OTHER; note = 2'-O-methylcytidine-3'-phosphate
  modified_base 23: mod_base = OTHER; note = 2'-O-methyluridine
tacacgaacatagacaccaggct

SEQ ID NO: 5271 - RNA, 23 nt, synthetic construct
  source 1..23: mol_type = other RNA
  modified_base 1: mod_base = OTHER; note = 2'-O-methyluridine-3'-phosphate 5'phosphate
  modified_base 2: mod_base = OTHER; note = 2'-deoxy-2'-fluoroadenosine-3'-phosphate
  modified_base 3: mod_base = OTHER; note = 2'-O-methyladenosine-3'-phosphate
  modified_base 4: mod_base = OTHER; note = 2'-O-methylcytidine-3'-phosphate
  modified_base 5: mod_base = OTHER; note = 2'-O-methyladenosine-3'-phosphate
  modified_base 6: mod_base = OTHER; note = 2'-deoxy-2'-fluorocytidine-3'-phosphate
  modified_base 7: mod_base = OTHER; note = 2'-O-methylguanosine-3'-phosphate
  modified_base 8: mod_base = OTHER; note = 2'-O-methyladenosine-3'-phosphate
  modified_base 9: mod_base = OTHER; note = 2'-O-methyladenosine-3'-phosphate
  modified_base 10: mod_base = OTHER; note = 2'-O-methylcytidine-3'-phosphate
  modified_base 11: mod_base = OTHER; note = 2'-O-methyladenosine-3'-phosphate
  modified_base 12: mod_base = OTHER; note = 2'-O-methyluridine-3'-phosphate
  modified_base 13: mod_base = OTHER; note = 2'-O-methyladenosine-3'-phosphate
  modified_base 14: mod_base = OTHER; note = 2'-deoxy-2'-fluoroguanosine-3'-phosphate
  modified_base 15: mod_base = OTHER; note = 2'-O-methyladenosine-3'-phosphate
  modified_base 16: mod_base = OTHER; note = 2'-deoxy-2'-fluorocytidine-3'-phosphate
  modified_base 17: mod_base = OTHER; note = 2'-O-methyladenosine-3'-phosphate
  modified_base 18: mod_base = OTHER; note = 2'-O-methylcytidine-3'-phosphate
  modified_base 19: mod_base = OTHER; note = 2'-O-methylcytidine-3'-phosphate
  modified_base 20: mod_base = OTHER; note = 2'-O-methyladenosine-3'-phosphate
  modified_base 21: mod_base = OTHER; note = 2'-O-methylguanosine-3'-phosphate
  modified_base 22: mod_base = OTHER; note = 2'-O-methylguanosine-3'-phosphate
  modified_base 23: mod_base = OTHER; note = 2'-O-methylcytidine
taacacgaacatagacaccaggc

SEQ ID NO: 5272 - RNA, 23 nt, synthetic construct
  source 1..23: mol_type = other RNA
  modified_base 1: mod_base = OTHER; note = 2'-O-methyluridine-3'-phosphate 5'phosphate
  modified_base 2: mod_base = OTHER; note = 2'-deoxy-2'-fluoroadenosine-3'-phosphate
  modified_base 3: mod_base = OTHER; note = 2'-O-methyladenosine-3'-phosphate
  modified_base 4: mod_base = OTHER; note = 2'-O-methyladenosine-3'-phosphate
  modified_base 5: mod_base = OTHER; note = 2'-O-methylcytidine-3'-phosphate
  modified_base 6: mod_base = OTHER; note = 2'-deoxy-2'-fluoroadenosine-3'-phosphate
  modified_base 7: mod_base = OTHER; note = 2'-O-methylcytidine-3'-phosphate
  modified_base 8: mod_base = OTHER; note = 2'-O-methylguanosine-3'-phosphate
  modified_base 9: mod_base = OTHER; note = 2'-O-methyladenosine-3'-phosphate
  modified_base 10: mod_base = OTHER; note = 2'-O-methyladenosine-3'-phosphate
  modified_base 11: mod_base = OTHER; note = 2'-O-methylcytidine-3'-phosphate
  modified_base 12: mod_base = OTHER; note = 2'-O-methyladenosine-3'-phosphate
  modified_base 13: mod_base = OTHER; note = 2'-O-methyluridine-3'-phosphate
  modified_base 14: mod_base = OTHER; note = 2'-deoxy-2'-fluoroadenosine-3'-phosphate
  modified_base 15: mod_base = OTHER; note = 2'-O-methylguanosine-3'-phosphate
  modified_base 16: mod_base = OTHER; note = 2'-deoxy-2'-fluoroadenosine-3'-phosphate
  modified_base 17: mod_base = OTHER; note = 2'-O-methylcytidine-3'-phosphate
  modified_base 18: mod_base = OTHER; note = 2'-O-methyladenosine-3'-phosphate
  modified_base 19: mod_base = OTHER; note = 2'-O-methylcytidine-3'-phosphate
  modified_base 20: mod_base = OTHER; note = 2'-O-methylcytidine-3'-phosphate
  modified_base 21: mod_base = OTHER; note = 2'-O-methyladenosine-3'-phosphate
  modified_base 22: mod_base = OTHER; note = 2'-O-methylguanosine-3'-phosphate
  modified_base 23: mod_base = OTHER; note = 2'-O-methylguanosine
taaacacgaacatagacaccagg

SEQ ID NO: 5273 - RNA, 23 nt, synthetic construct
  source 1..23: mol_type = other RNA
  modified_base 1: mod_base = OTHER; note = 2'-O-methyluridine-3'-phosphate 5'phosphate
  modified_base 2: mod_base = OTHER; note = 2'-deoxy-2'-fluoroguanosine-3'-phosphate
  modified_base 3: mod_base = OTHER; note = 2'-O-methyladenosine-3'-phosphate
  modified_base 4: mod_base = OTHER; note = 2'-O-methyladenosine-3'-phosphate
  modified_base 5: mod_base = OTHER; note = 2'-O-methyladenosine-3'-phosphate
  modified_base 6: mod_base = OTHER; note = 2'-deoxy-2'-fluorocytidine-3'-phosphate
  modified_base 7: mod_base = OTHER; note = 2'-O-methyladenosine-3'-phosphate
  modified_base 8: mod_base = OTHER; note = 2'-O-methylcytidine-3'-phosphate
  modified_base 9: mod_base = OTHER; note = 2'-O-methylguanosine-3'-phosphate
  modified_base 10: mod_base = OTHER; note = 2'-O-methyladenosine-3'-phosphate
  modified_base 11: mod_base = OTHER; note = 2'-O-methyladenosine-3'-phosphate
  modified_base 12: mod_base = OTHER; note = 2'-O-methylcytidine-3'-phosphate
  modified_base 13: mod_base = OTHER; note = 2'-O-methyladenosine-3'-phosphate
  modified_base 14: mod_base = OTHER; note = 2'-deoxy-2'-fluorouridine-3'-phosphate
  modified_base 15: mod_base = OTHER; note = 2'-O-methyladenosine-3'-phosphate
  modified_base 16: mod_base = OTHER; note = 2'-deoxy-2'-fluoroguanosine-3'-phosphate
  modified_base 17: mod_base = OTHER; note = 2'-O-methyladenosine-3'-phosphate
  modified_base 18: mod_base = OTHER; note = 2'-O-methylcytidine-3'-phosphate
  modified_base 19: mod_base = OTHER; note = 2'-O-methyladenosine-3'-phosphate
  modified_base 20: mod_base = OTHER; note = 2'-O-methylcytidine-3'-phosphate
  modified_base 21: mod_base = OTHER; note = 2'-O-methylcytidine-3'-phosphate
  modified_base 22: mod_base = OTHER; note = 2'-O-methyladenosine-3'-phosphate
  modified_base 23: mod_base = OTHER; note = 2'-O-methylguanosine
tgaaacacgaacatagacaccag

SEQ ID NO: 5274 - RNA, 23 nt, synthetic construct
  source 1..23: mol_type = other RNA
  modified_base 1: mod_base = OTHER; note = 2'-O-methyluridine-3'-phosphate 5'phosphate
  modified_base 2: mod_base = OTHER; note = 2'-deoxy-2'-fluorouridine-3'-phosphate
  modified_base 3: mod_base = OTHER; note = 2'-O-methylguanosine-3'-phosphate
  modified_base 4: mod_base = OTHER; note = 2'-O-methyladenosine-3'-phosphate
  modified_base 5: mod_base = OTHER; note = 2'-O-methyladenosine-3'-phosphate
  modified_base 6: mod_base = OTHER; note = 2'-deoxy-2'-fluoroadenosine-3'-phosphate
  modified_base 7: mod_base = OTHER; note = 2'-O-methylcytidine-3'-phosphate
  modified_base 8: mod_base = OTHER; note = 2'-O-methyladenosine-3'-phosphate
  modified_base 9: mod_base = OTHER; note = 2'-O-methylcytidine-3'-phosphate
  modified_base 10: mod_base = OTHER; note = 2'-O-methylguanosine-3'-phosphate
  modified_base 11: mod_base = OTHER; note = 2'-O-methyladenosine-3'-phosphate
  modified_base 12: mod_base = OTHER; note = 2'-O-methyladenosine-3'-phosphate
  modified_base 13: mod_base = OTHER; note = 2'-O-methylcytidine-3'-phosphate
  modified_base 14: mod_base = OTHER; note = 2'-deoxy-2'-fluoroadenosine-3'-phosphate
  modified_base 15: mod_base = OTHER; note = 2'-O-methyluridine-3'-phosphate
  modified_base 16: mod_base = OTHER; note = 2'-deoxy-2'-fluoroadenosine-3'-phosphate
  modified_base 17: mod_base = OTHER; note = 2'-O-methylguanosine-3'-phosphate
  modified_base 18: mod_base = OTHER; note = 2'-O-methyladenosine-3'-phosphate
  modified_base 19: mod_base = OTHER; note = 2'-O-methylcytidine-3'-phosphate
  modified_base 20: mod_base = OTHER; note = 2'-O-methyladenosine-3'-phosphate
  modified_base 21: mod_base = OTHER; note = 2'-O-methylcytidine-3'-phosphate
  modified_base 22: mod_base = OTHER; note = 2'-O-methylcytidine-3'-phosphate
  modified_base 23: mod_base = OTHER; note = 2'-O-methyladenosine
ttgaaacacgaacatagacacca

SEQ ID NO: 5275 - RNA, 23 nt, synthetic construct
  source 1..23: mol_type = other RNA
  modified_base 1: mod_base = OTHER; note = 2'-O-methyluridine-3'-phosphate 5'phosphate
  modified_base 2: mod_base = OTHER; note = 2'-deoxy-2'-fluorouridine-3'-phosphate
  modified_base 3: mod_base = OTHER; note = 2'-O-methyluridine-3'-phosphate
  modified_base 4: mod_base = OTHER; note = 2'-O-methylguanosine-3'-phosphate
  modified_base 5: mod_base = OTHER; note = 2'-O-methyladenosine-3'-phosphate
  modified_base 6: mod_base = OTHER; note = 2'-deoxy-2'-fluoroadenosine-3'-phosphate
  modified_base 7: mod_base = OTHER; note = 2'-O-methyladenosine-3'-phosphate
  modified_base 8: mod_base = OTHER; note = 2'-O-methylcytidine-3'-phosphate
  modified_base 9: mod_base = OTHER; note = 2'-O-methyladenosine-3'-phosphate
  modified_base 10: mod_base = OTHER; note = 2'-O-methylcytidine-3'-phosphate
  modified_base 11: mod_base = OTHER; note = 2'-O-methylguanosine-3'-phosphate
  modified_base 12: mod_base = OTHER; note = 2'-O-methyladenosine-3'-phosphate
  modified_base 13: mod_base = OTHER; note = 2'-O-methyladenosine-3'-phosphate
  modified_base 14: mod_base = OTHER; note = 2'-deoxy-2'-fluorocytidine-3'-phosphate
  modified_base 15: mod_base = OTHER; note = 2'-O-methyladenosine-3'-phosphate
  modified_base 16: mod_base = OTHER; note = 2'-deoxy-2'-fluorouridine-3'-phosphate
  modified_base 17: mod_base = OTHER; note = 2'-O-methyladenosine-3'-phosphate
  modified_base 18: mod_base = OTHER; note = 2'-O-methylguanosine-3'-phosphate
  modified_base 19: mod_base = OTHER; note = 2'-O-methyladenosine-3'-phosphate
  modified_base 20: mod_base = OTHER; note = 2'-O-methylcytidine-3'-phosphate
  modified_base 21: mod_base = OTHER; note = 2'-O-methyladenosine-3'-phosphate
  modified_base 22: mod_base = OTHER; note = 2'-O-methylcytidine-3'-phosphate
  modified_base 23: mod_base = OTHER; note = 2'-O-methylcytidine
tttgaaacacgaacatagacacc

SEQ ID NO: 5276 - RNA, 23 nt, synthetic construct
  source 1..23: mol_type = other RNA
  modified_base 1: mod_base = OTHER; note = 2'-O-methyluridine-3'-phosphate 5'phosphate
  modified_base 2: mod_base = OTHER; note = 2'-deoxy-2'-fluorocytidine-3'-phosphate
  modified_base 3: mod_base = OTHER; note = 2'-O-methyluridine-3'-phosphate
  modified_base 4: mod_base = OTHER; note = 2'-O-methyluridine-3'-phosphate
  modified_base 5: mod_base = OTHER; note = 2'-O-methylguanosine-3'-phosphate
  modified_base 6: mod_base = OTHER; note = 2'-deoxy-2'-fluoroadenosine-3'-phosphate
  modified_base 7: mod_base = OTHER; note = 2'-O-methyladenosine-3'-phosphate
  modified_base 8: mod_base = OTHER; note = 2'-O-methyladenosine-3'-phosphate
  modified_base 9: mod_base = OTHER; note = 2'-O-methylcytidine-3'-phosphate
  modified_base 10: mod_base = OTHER; note = 2'-O-methyladenosine-3'-phosphate
  modified_base 11: mod_base = OTHER; note = 2'-O-methylcytidine-3'-phosphate
  modified_base 12: mod_base = OTHER; note = 2'-O-methylguanosine-3'-phosphate
  modified_base 13: mod_base = OTHER; note = 2'-O-methyladenosine-3'-phosphate
  modified_base 14: mod_base = OTHER; note = 2'-deoxy-2'-fluoroadenosine-3'-phosphate
  modified_base 15: mod_base = OTHER; note = 2'-O-methylcytidine-3'-phosphate
  modified_base 16: mod_base = OTHER; note = 2'-deoxy-2'-fluoroadenosine-3'-phosphate
  modified_base 17: mod_base = OTHER; note = 2'-O-methyluridine-3'-phosphate
  modified_base 18: mod_base = OTHER; note = 2'-O-methyladenosine-3'-phosphate
  modified_base 19: mod_base = OTHER; note = 2'-O-methylguanosine-3'-phosphate
  modified_base 20: mod_base = OTHER; note = 2'-O-methyladenosine-3'-phosphate
  modified_base 21: mod_base = OTHER; note = 2'-O-methylcytidine-3'-phosphate
  modified_base 22: mod_base = OTHER; note = 2'-O-methyladenosine-3'-phosphate
  modified_base 23: mod_base = OTHER; note = 2'-O-methylcytidine
tcttgaaacacgaacatagacac

SEQ ID NO: 5277 - RNA, 23 nt, synthetic construct
  source 1..23: mol_type = other RNA
  modified_base 1: mod_base = OTHER; note = 2'-O-methyluridine-3'-phosphate 5'phosphate
  modified_base 2: mod_base = OTHER; note = 2'-deoxy-2'-fluorocytidine-3'-phosphate
  modified_base 3: mod_base = OTHER; note = 2'-O-methylcytidine-3'-phosphate
  modified_base 4: mod_base = OTHER; note = 2'-O-methyluridine-3'-phosphate
  modified_base 5: mod_base = OTHER; note = 2'-O-methyluridine-3'-phosphate
  modified_base 6: mod_base = OTHER; note = 2'-deoxy-2'-fluoroguanosine-3'-phosphate
  modified_base 7: mod_base = OTHER; note = 2'-O-methyladenosine-3'-phosphate
  modified_base 8: mod_base = OTHER; note = 2'-O-methyladenosine-3'-phosphate
  modified_base 9: mod_base = OTHER; note = 2'-O-methyladenosine-3'-phosphate
  modified_base 10: mod_base = OTHER; note = 2'-O-methylcytidine-3'-phosphate
  modified_base 11: mod_base = OTHER; note = 2'-O-methyladenosine-3'-phosphate
  modified_base 12: mod_base = OTHER; note = 2'-O-methylcytidine-3'-phosphate
  modified_base 13: mod_base = OTHER; note = 2'-O-methylguanosine-3'-phosphate
  modified_base 14: mod_base = OTHER; note = 2'-deoxy-2'-fluoroadenosine-3'-phosphate
  modified_base 15: mod_base = OTHER; note = 2'-O-methyladenosine-3'-phosphate
  modified_base 16: mod_base = OTHER; note = 2'-deoxy-2'-fluorocytidine-3'-phosphate
  modified_base 17: mod_base = OTHER; note = 2'-O-methyladenosine-3'-phosphate
  modified_base 18: mod_base = OTHER; note = 2'-O-methyluridine-3'-phosphate
  modified_base 19: mod_base = OTHER; note = 2'-O-methyladenosine-3'-phosphate
  modified_base 20: mod_base = OTHER; note = 2'-O-methylguanosine-3'-phosphate
  modified_base 21: mod_base = OTHER; note = 2'-O-methyladenosine-3'-phosphate
  modified_base 22: mod_base = OTHER; note = 2'-O-methylcytidine-3'-phosphate
  modified_base 23: mod_base = OTHER; note = 2'-O-methyladenosine
tccttgaaacacgaacatagaca

SEQ ID NO: 5278 - RNA, 23 nt, synthetic construct
  source 1..23: mol_type = other RNA
  modified_base 1: mod_base = OTHER; note = 2'-O-methyluridine-3'-phosphate 5'phosphate
  modified_base 2: mod_base = OTHER; note = 2'-deoxy-2'-fluoroadenosine-3'-phosphate
  modified_base 3: mod_base = OTHER; note = 2'-O-methylcytidine-3'-phosphate
  modified_base 4: mod_base = OTHER; note = 2'-O-methylcytidine-3'-phosphate
  modified_base 5: mod_base = OTHER; note = 2'-O-methyluridine-3'-phosphate
  modified_base 6: mod_base = OTHER; note = 2'-deoxy-2'-fluorouridine-3'-phosphate
  modified_base 7: mod_base = OTHER; note = 2'-O-methylguanosine-3'-phosphate
  modified_base 8: mod_base = OTHER; note = 2'-O-methyladenosine-3'-phosphate
  modified_base 9: mod_base = OTHER; note = 2'-O-methyladenosine-3'-phosphate
  modified_base 10: mod_base = OTHER; note = 2'-O-methyladenosine-3'-phosphate
  modified_base 11: mod_base = OTHER; note = 2'-O-methylcytidine-3'-phosphate
  modified_base 12: mod_base = OTHER; note = 2'-O-methyladenosine-3'-phosphate
  modified_base 13: mod_base = OTHER; note = 2'-O-methylcytidine-3'-phosphate
  modified_base 14: mod_base = OTHER; note = 2'-deoxy-2'-fluoroguanosine-3'-phosphate
  modified_base 15: mod_base = OTHER; note = 2'-O-methyladenosine-3'-phosphate
  modified_base 16: mod_base = OTHER; note = 2'-deoxy-2'-fluoroadenosine-3'-phosphate
  modified_base 17: mod_base = OTHER; note = 2'-O-methylcytidine-3'-phosphate
  modified_base 18: mod_base = OTHER; note = 2'-O-methyladenosine-3'-phosphate
  modified_base 19: mod_base = OTHER; note = 2'-O-methyluridine-3'-phosphate
  modified_base 20: mod_base = OTHER; note = 2'-O-methyladenosine-3'-phosphate
  modified_base 21: mod_base = OTHER; note = 2'-O-methylguanosine-3'-phosphate
  modified_base 22: mod_base = OTHER; note = 2'-O-methyladenosine-3'-phosphate
  modified_base 23: mod_base = OTHER; note = 2'-O-methylcytidine
taccttgaaacacgaacatagac

SEQ ID NO: 5279 - RNA, 23 nt, synthetic construct
  source 1..23: mol_type = other RNA
  modified_base 1: mod_base = OTHER; note = 2'-O-methyluridine-3'-phosphate 5'phosphate
  modified_base 2: mod_base = OTHER; note = 2'-deoxy-2'-fluoroadenosine-3'-phosphate
  modified_base 3: mod_base = OTHER; note = 2'-O-methyladenosine-3'-phosphate
  modified_base 4: mod_base = OTHER; note = 2'-O-methylcytidine-3'-phosphate
  modified_base 5: mod_base = OTHER; note = 2'-O-methylcytidine-3'-phosphate
  modified_base 6: mod_base = OTHER; note = 2'-deoxy-2'-fluorouridine-3'-phosphate
  modified_base 7: mod_base = OTHER; note = 2'-O-methyluridine-3'-phosphate
  modified_base 8: mod_base = OTHER; note = 2'-O-methylguanosine-3'-phosphate
  modified_base 9: mod_base = OTHER; note = 2'-O-methyladenosine-3'-phosphate
  modified_base 10: mod_base = OTHER; note = 2'-O-methyladenosine-3'-phosphate
  modified_base 11: mod_base = OTHER; note = 2'-O-methyladenosine-3'-phosphate
  modified_base 12: mod_base = OTHER; note = 2'-O-methylcytidine-3'-phosphate
  modified_base 13: mod_base = OTHER; note = 2'-O-methyladenosine-3'-phosphate
  modified_base 14: mod_base = OTHER; note = 2'-deoxy-2'-fluorocytidine-3'-phosphate
  modified_base 15: mod_base = OTHER; note = 2'-O-methylguanosine-3'-phosphate
  modified_base 16: mod_base = OTHER; note = 2'-deoxy-2'-fluoroadenosine-3'-phosphate
  modified_base 17: mod_base = OTHER; note = 2'-O-methyladenosine-3'-phosphate
  modified_base 18: mod_base = OTHER; note = 2'-O-methylcytidine-3'-phosphate
  modified_base 19: mod_base = OTHER; note = 2'-O-methyladenosine-3'-phosphate
  modified_base 20: mod_base = OTHER; note = 2'-O-methyluridine-3'-phosphate
  modified_base 21: mod_base = OTHER; note = 2'-O-methyladenosine-3'-phosphate
  modified_base 22: mod_base = OTHER; note = 2'-O-methylguanosine-3'-phosphate
  modified_base 23: mod_base = OTHER; note = 2'-O-methyladenosine
taaccttgaaacacgaacataga

SEQ ID NO: 5280 - RNA, 23 nt, synthetic construct
  source 1..23: mol_type = other RNA
  modified_base 1: mod_base = OTHER; note = 2'-O-methyluridine-3'-phosphate 5'phosphate
  modified_base 2: mod_base = OTHER; note = 2'-deoxy-2'-fluoroadenosine-3'-phosphate
  modified_base 3: mod_base = OTHER; note = 2'-O-methyladenosine-3'-phosphate
  modified_base 4: mod_base = OTHER; note = 2'-O-methyladenosine-3'-phosphate
  modified_base 5: mod_base = OTHER; note = 2'-O-methylcytidine-3'-phosphate
  modified_base 6: mod_base = OTHER; note = 2'-deoxy-2'-fluorocytidine-3'-phosphate
  modified_base 7: mod_base = OTHER; note = 2'-O-methyluridine-3'-phosphate
  modified_base 8: mod_base = OTHER; note = 2'-O-methyluridine-3'-phosphate
  modified_base 9: mod_base = OTHER; note = 2'-O-methylguanosine-3'-phosphate
  modified_base 10: mod_base = OTHER; note = 2'-O-methyladenosine-3'-phosphate
  modified_base 11: mod_base = OTHER; note = 2'-O-methyladenosine-3'-phosphate
  modified_base 12: mod_base = OTHER; note = 2'-O-methyladenosine-3'-phosphate
  modified_base 13: mod_base = OTHER; note = 2'-O-methylcytidine-3'-phosphate
  modified_base 14: mod_base = OTHER; note = 2'-deoxy-2'-fluoroadenosine-3'-phosphate
  modified_base 15: mod_base = OTHER; note = 2'-O-methylcytidine-3'-phosphate
  modified_base 16: mod_base = OTHER; note = 2'-deoxy-2'-fluoroguanosine-3'-phosphate
  modified_base 17: mod_base = OTHER; note = 2'-O-methyladenosine-3'-phosphate
  modified_base 18: mod_base = OTHER; note = 2'-O-methyladenosine-3'-phosphate
  modified_base 19: mod_base = OTHER; note = 2'-O-methylcytidine-3'-phosphate
  modified_base 20: mod_base = OTHER; note = 2'-O-methyladenosine-3'-phosphate
  modified_base 21: mod_base = OTHER; note = 2'-O-methyluridine-3'-phosphate
  modified_base 22: mod_base = OTHER; note = 2'-O-methyladenosine-3'-phosphate
  modified_base 23: mod_base = OTHER; note = 2'-O-methylguanosine
taaaccttgaaacacgaacatag

SEQ ID NO: 5281 - RNA, 23 nt, synthetic construct
  source 1..23: mol_type = other RNA
  modified_base 1: mod_base = OTHER; note = 2'-O-methyluridine-3'-phosphate 5'phosphate
  modified_base 2: mod_base = OTHER; note = 2'-deoxy-2'-fluorocytidine-3'-phosphate
  modified_base 3: mod_base = OTHER; note = 2'-O-methyladenosine-3'-phosphate
  modified_base 4: mod_base = OTHER; note = 2'-O-methyladenosine-3'-phosphate
  modified_base 5: mod_base = OTHER; note = 2'-O-methyladenosine-3'-phosphate
  modified_base 6: mod_base = OTHER; note = 2'-deoxy-2'-fluorocytidine-3'-phosphate
  modified_base 7: mod_base = OTHER; note = 2'-O-methylcytidine-3'-phosphate
  modified_base 8: mod_base = OTHER; note = 2'-O-methyluridine-3'-phosphate
  modified_base 9: mod_base = OTHER; note = 2'-O-methyluridine-3'-phosphate
  modified_base 10: mod_base = OTHER; note = 2'-O-methylguanosine-3'-phosphate
  modified_base 11: mod_base = OTHER; note = 2'-O-methyladenosine-3'-phosphate
  modified_base 12: mod_base = OTHER; note = 2'-O-methyladenosine-3'-phosphate
  modified_base 13: mod_base = OTHER; note = 2'-O-methyladenosine-3'-phosphate
  modified_base 14: mod_base = OTHER; note = 2'-deoxy-2'-fluorocytidine-3'-phosphate
  modified_base 15: mod_base = OTHER; note = 2'-O-methyladenosine-3'-phosphate
  modified_base 16: mod_base = OTHER; note = 2'-deoxy-2'-fluorocytidine-3'-phosphate
  modified_base 17: mod_base = OTHER; note = 2'-O-methylguanosine-3'-phosphate
  modified_base 18: mod_base = OTHER; note = 2'-O-methyladenosine-3'-phosphate
  modified_base 19: mod_base = OTHER; note = 2'-O-methyladenosine-3'-phosphate
  modified_base 20: mod_base = OTHER; note = 2'-O-methylcytidine-3'-phosphate
  modified_base 21: mod_base = OTHER; note = 2'-O-methyladenosine-3'-phosphate
  modified_base 22: mod_base = OTHER; note = 2'-O-methyluridine-3'-phosphate
  modified_base 23: mod_base = OTHER; note = 2'-O-methyladenosine
tcaaaccttgaaacacgaacata

SEQ ID NO: 5282 - RNA, 23 nt, synthetic construct
  source 1..23: mol_type = other RNA
  modified_base 1: mod_base = OTHER; note = 2'-O-methyluridine-3'-phosphate 5'phosphate
  modified_base 2: mod_base = OTHER; note = 2'-deoxy-2'-fluoroadenosine-3'-phosphate
  modified_base 3: mod_base = OTHER; note = 2'-O-methylcytidine-3'-phosphate
  modified_base 4: mod_base = OTHER; note = 2'-O-methyladenosine-3'-phosphate
  modified_base 5: mod_base = OTHER; note = 2'-O-methyladenosine-3'-phosphate
  modified_base 6: mod_base = OTHER; note = 2'-deoxy-2'-fluoroadenosine-3'-phosphate
  modified_base 7: mod_base = OTHER; note = 2'-O-methylcytidine-3'-phosphate
  modified_base 8: mod_base = OTHER; note = 2'-O-methylcytidine-3'-phosphate
  modified_base 9: mod_base = OTHER; note = 2'-O-methyluridine-3'-phosphate
  modified_base 10: mod_base = OTHER; note = 2'-O-methyluridine-3'-phosphate
  modified_base 11: mod_base = OTHER; note = 2'-O-methylguanosine-3'-phosphate
  modified_base 12: mod_base = OTHER; note = 2'-O-methyladenosine-3'-phosphate
  modified_base 13: mod_base = OTHER; note = 2'-O-methyladenosine-3'-phosphate
  modified_base 14: mod_base = OTHER; note = 2'-deoxy-2'-fluoroadenosine-3'-phosphate
  modified_base 15: mod_base = OTHER; note = 2'-O-methylcytidine-3'-phosphate
  modified_base 16: mod_base = OTHER; note = 2'-deoxy-2'-fluoroadenosine-3'-phosphate
  modified_base 17: mod_base = OTHER; note = 2'-O-methylcytidine-3'-phosphate
  modified_base 18: mod_base = OTHER; note = 2'-O-methylguanosine-3'-phosphate
  modified_base 19: mod_base = OTHER; note = 2'-O-methyladenosine-3'-phosphate
  modified_base 20: mod_base = OTHER; note = 2'-O-methyladenosine-3'-phosphate
  modified_base 21: mod_base = OTHER; note = 2'-O-methylcytidine-3'-phosphate
  modified_base 22: mod_base = OTHER; note = 2'-O-methyladenosine-3'-phosphate
  modified_base 23: mod_base = OTHER; note = 2'-O-methyluridine
tacaaaccttgaaacacgaacat

SEQ ID NO: 5283 - RNA, 23 nt, synthetic construct
  source 1..23: mol_type = other RNA
  modified_base 1: mod_base = OTHER; note = 2'-O-methyluridine-3'-phosphate 5'phosphate
  modified_base 2: mod_base = OTHER; note = 2'-deoxy-2'-fluoroadenosine-3'-phosphate
  modified_base 3: mod_base = OTHER; note = 2'-O-methyladenosine-3'-phosphate
  modified_base 4: mod_base = OTHER; note = 2'-O-methylcytidine-3'-phosphate
  modified_base 5: mod_base = OTHER; note = 2'-O-methyladenosine-3'-phosphate
  modified_base 6: mod_base = OTHER; note = 2'-deoxy-2'-fluoroadenosine-3'-phosphate
  modified_base 7: mod_base = OTHER; note = 2'-O-methyladenosine-3'-phosphate
  modified_base 8: mod_base = OTHER; note = 2'-O-methylcytidine-3'-phosphate
  modified_base 9: mod_base = OTHER; note = 2'-O-methylcytidine-3'-phosphate
  modified_base 10: mod_base = OTHER; note = 2'-O-methyluridine-3'-phosphate
  modified_base 11: mod_base = OTHER; note = 2'-O-methyluridine-3'-phosphate
  modified_base 12: mod_base = OTHER; note = 2'-O-methylguanosine-3'-phosphate
  modified_base 13: mod_base = OTHER; note = 2'-O-methyladenosine-3'-phosphate
  modified_base 14: mod_base = OTHER; note = 2'-deoxy-2'-fluoroadenosine-3'-phosphate
  modified_base 15: mod_base = OTHER; note = 2'-O-methyladenosine-3'-phosphate
  modified_base 16: mod_base = OTHER; note = 2'-deoxy-2'-fluorocytidine-3'-phosphate
  modified_base 17: mod_base = OTHER; note = 2'-O-methyladenosine-3'-phosphate
  modified_base 18: mod_base = OTHER; note = 2'-O-methylcytidine-3'-phosphate
  modified_base 19: mod_base = OTHER; note = 2'-O-methylguanosine-3'-phosphate
  modified_base 20: mod_base = OTHER; note = 2'-O-methyladenosine-3'-phosphate
  modified_base 21: mod_base = OTHER; note = 2'-O-methyladenosine-3'-phosphate
  modified_base 22: mod_base = OTHER; note = 2'-O-methylcytidine-3'-phosphate
  modified_base 23: mod_base = OTHER; note = 2'-O-methyladenosine
taacaaaccttgaaacacgaaca

SEQ ID NO: 5284 - RNA, 23 nt, synthetic construct
  source 1..23: mol_type = other RNA
  modified_base 1: mod_base = OTHER; note = 2'-O-methyluridine-3'-phosphate 5'phosphate
  modified_base 2: mod_base = OTHER; note = 2'-deoxy-2'-fluorouridine-3'-phosphate
  modified_base 3: mod_base = OTHER; note = 2'-O-methyladenosine-3'-phosphate
  modified_base 4: mod_base = OTHER; note = 2'-O-methyladenosine-3'-phosphate
  modified_base 5: mod_base = OTHER; note = 2'-O-methylcytidine-3'-phosphate
  modified_base 6: mod_base = OTHER; note = 2'-deoxy-2'-fluoroadenosine-3'-phosphate
  modified_base 7: mod_base = OTHER; note = 2'-O-methyladenosine-3'-phosphate
  modified_base 8: mod_base = OTHER; note = 2'-O-methyladenosine-3'-phosphate
  modified_base 9: mod_base = OTHER; note = 2'-O-methylcytidine-3'-phosphate
  modified_base 10: mod_base = OTHER; note = 2'-O-methylcytidine-3'-phosphate
  modified_base 11: mod_base = OTHER; note = 2'-O-methyluridine-3'-phosphate
  modified_base 12: mod_base = OTHER; note = 2'-O-methyluridine-3'-phosphate
  modified_base 13: mod_base = OTHER; note = 2'-O-methylguanosine-3'-phosphate
  modified_base 14: mod_base = OTHER; note = 2'-deoxy-2'-fluoroadenosine-3'-phosphate
  modified_base 15: mod_base = OTHER; note = 2'-O-methyladenosine-3'-phosphate
  modified_base 16: mod_base = OTHER; note = 2'-deoxy-2'-fluoroadenosine-3'-phosphate
  modified_base 17: mod_base = OTHER; note = 2'-O-methylcytidine-3'-phosphate
  modified_base 18: mod_base = OTHER; note = 2'-O-methyladenosine-3'-phosphate
  modified_base 19: mod_base = OTHER; note = 2'-O-methylcytidine-3'-phosphate
  modified_base 20: mod_base = OTHER; note = 2'-O-methylguanosine-3'-phosphate
  modified_base 21: mod_base = OTHER; note = 2'-O-methyladenosine-3'-phosphate
  modified_base 22: mod_base = OTHER; note = 2'-O-methyladenosine-3'-phosphate
  modified_base 23: mod_base = OTHER; note = 2'-O-methylcytidine
ttaacaaaccttgaaacacgaac

SEQ ID NO: 5285 - RNA, 23 nt, synthetic construct
  source 1..23: mol_type = other RNA
  modified_base 1: mod_base = OTHER; note = 2'-O-methyluridine-3'-phosphate 5'phosphate
  modified_base 2: mod_base = OTHER; note = 2'-deoxy-2'-fluoroguanosine-3'-phosphate
  modified_base 3: mod_base = OTHER; note = 2'-O-methyluridine-3'-phosphate
  modified_base 4: mod_base = OTHER; note = 2'-O-methyladenosine-3'-phosphate
  modified_base 5: mod_base = OTHER; note = 2'-O-methyladenosine-3'-phosphate
  modified_base 6: mod_base = OTHER; note = 2'-deoxy-2'-fluorocytidine-3'-phosphate
  modified_base 7: mod_base = OTHER; note = 2'-O-methyladenosine-3'-phosphate
  modified_base 8: mod_base = OTHER; note = 2'-O-methyladenosine-3'-phosphate
  modified_base 9: mod_base = OTHER; note = 2'-O-methyladenosine-3'-phosphate
  modified_base 10: mod_base = OTHER; note = 2'-O-methylcytidine-3'-phosphate
  modified_base 11: mod_base = OTHER; note = 2'-O-methylcytidine-3'-phosphate
  modified_base 12: mod_base = OTHER; note = 2'-O-methyluridine-3'-phosphate
  modified_base 13: mod_base = OTHER; note = 2'-O-methyluridine-3'-phosphate
  modified_base 14: mod_base = OTHER; note = 2'-deoxy-2'-fluoroguanosine-3'-phosphate
  modified_base 15: mod_base = OTHER; note = 2'-O-methyladenosine-3'-phosphate
  modified_base 16: mod_base = OTHER; note = 2'-deoxy-2'-fluoroadenosine-3'-phosphate
  modified_base 17: mod_base = OTHER; note = 2'-O-methyladenosine-3'-phosphate
  modified_base 18: mod_base = OTHER; note = 2'-O-methylcytidine-3'-phosphate
  modified_base 19: mod_base = OTHER; note = 2'-O-methyladenosine-3'-phosphate
  modified_base 20: mod_base = OTHER; note = 2'-O-methylcytidine-3'-phosphate
  modified_base 21: mod_base = OTHER; note = 2'-O-methylguanosine-3'-phosphate
  modified_base 22: mod_base = OTHER; note = 2'-O-methyladenosine-3'-phosphate
  modified_base 23: mod_base = OTHER; note = 2'-O-methyladenosine
tgtaacaaaccttgaaacacgaa

SEQ ID NO: 5286 - RNA, 23 nt, synthetic construct
  source 1..23: mol_type = other RNA
  modified_base 1: mod_base = OTHER; note = 2'-O-methyluridine-3'-phosphate 5'phosphate
  modified_base 2: mod_base = OTHER; note = 2'-deoxy-2'-fluoroadenosine-3'-phosphate
  modified_base 3: mod_base = OTHER; note = 2'-O-methylguanosine-3'-phosphate
  modified_base 4: mod_base = OTHER; note = 2'-O-methyluridine-3'-phosphate
  modified_base 5: mod_base = OTHER; note = 2'-O-methyladenosine-3'-phosphate
  modified_base 6: mod_base = OTHER; note = 2'-deoxy-2'-fluoroadenosine-3'-phosphate
  modified_base 7: mod_base = OTHER; note = 2'-O-methylcytidine-3'-phosphate
  modified_base 8: mod_base = OTHER; note = 2'-O-methyladenosine-3'-phosphate
  modified_base 9: mod_base = OTHER; note = 2'-O-methyladenosine-3'-phosphate
  modified_base 10: mod_base = OTHER; note = 2'-O-methyladenosine-3'-phosphate
  modified_base 11: mod_base = OTHER; note = 2'-O-methylcytidine-3'-phosphate
  modified_base 12: mod_base = OTHER; note = 2'-O-methylcytidine-3'-phosphate
  modified_base 13: mod_base = OTHER; note = 2'-O-methyluridine-3'-phosphate
  modified_base 14: mod_base = OTHER; note = 2'-deoxy-2'-fluorouridine-3'-phosphate
  modified_base 15: mod_base = OTHER; note = 2'-O-methylguanosine-3'-phosphate
  modified_base 16: mod_base = OTHER; note = 2'-deoxy-2'-fluoroadenosine-3'-phosphate
  modified_base 17: mod_base = OTHER; note = 2'-O-methyladenosine-3'-phosphate
  modified_base 18: mod_base = OTHER; note = 2'-O-methyladenosine-3'-phosphate
  modified_base 19: mod_base = OTHER; note = 2'-O-methylcytidine-3'-phosphate
  modified_base 20: mod_base = OTHER; note = 2'-O-methyladenosine-3'-phosphate
  modified_base 21: mod_base = OTHER; note = 2'-O-methylcytidine-3'-phosphate
  modified_base 22: mod_base = OTHER; note = 2'-O-methylguanosine-3'-phosphate
  modified_base 23: mod_base = OTHER; note = 2'-O-methyladenosine
tagtaacaaaccttgaaacacga

SEQ ID NO: 5287 - RNA, 23 nt, synthetic construct
  source 1..23: mol_type = other RNA
  modified_base 1: mod_base = OTHER; note = 2'-O-methyluridine-3'-phosphate 5'phosphate
  modified_base 2: mod_base = OTHER; note = 2'-deoxy-2'-fluoroadenosine-3'-phosphate
  modified_base 3: mod_base = OTHER; note = 2'-O-methyladenosine-3'-phosphate
  modified_base 4: mod_base = OTHER; note = 2'-O-methylguanosine-3'-phosphate
  modified_base 5: mod_base = OTHER; note = 2'-O-methyluridine-3'-phosphate
  modified_base 6: mod_base = OTHER; note = 2'-deoxy-2'-fluoroadenosine-3'-phosphate
  modified_base 7: mod_base = OTHER; note = 2'-O-methyladenosine-3'-phosphate
  modified_base 8: mod_base = OTHER; note = 2'-O-methylcytidine-3'-phosphate
  modified_base 9: mod_base = OTHER; note = 2'-O-methyladenosine-3'-phosphate
  modified_base 10: mod_base = OTHER; note = 2'-O-methyladenosine-3'-phosphate
  modified_base 11: mod_base = OTHER; note = 2'-O-methyladenosine-3'-phosphate
  modified_base 12: mod_base = OTHER; note = 2'-O-methylcytidine-3'-phosphate
  modified_base 13: mod_base = OTHER; note = 2'-O-methylcytidine-3'-phosphate
  modified_base 14: mod_base = OTHER; note = 2'-deoxy-2'-fluorouridine-3'-phosphate
  modified_base 15: mod_base = OTHER; note = 2'-O-methyluridine-3'-phosphate
  modified_base 16: mod_base = OTHER; note = 2'-deoxy-2'-fluoroguanosine-3'-phosphate
  modified_base 17: mod_base = OTHER; note = 2'-O-methyladenosine-3'-phosphate
  modified_base 18: mod_base = OTHER; note = 2'-O-methyladenosine-3'-phosphate
  modified_base 19: mod_base = OTHER; note = 2'-O-methyladenosine-3'-phosphate
  modified_base 20: mod_base = OTHER; note = 2'-O-methylcytidine-3'-phosphate
  modified_base 21: mod_base = OTHER; note = 2'-O-methyladenosine-3'-phosphate
  modified_base 22: mod_base = OTHER; note = 2'-O-methylcytidine-3'-phosphate
  modified_base 23: mod_base = OTHER; note = 2'-O-methylguanosine
taagtaacaaaccttgaaacacg

SEQ ID NO: 5288 - RNA, 23 nt, synthetic construct
  source 1..23: mol_type = other RNA
  modified_base 1: mod_base = OTHER; note = 2'-O-methyluridine-3'-phosphate 5'phosphate
  modified_base 2: mod_base = OTHER; note = 2'-deoxy-2'-fluorocytidine-3'-phosphate
  modified_base 3: mod_base = OTHER; note = 2'-O-methyladenosine-3'-phosphate
  modified_base 4: mod_base = OTHER; note = 2'-O-methyladenosine-3'-phosphate
  modified_base 5: mod_base = OTHER; note = 2'-O-methylguanosine-3'-phosphate
  modified_base 6: mod_base = OTHER; note = 2'-deoxy-2'-fluorouridine-3'-phosphate
  modified_base 7: mod_base = OTHER; note = 2'-O-methyladenosine-3'-phosphate
  modified_base 8: mod_base = OTHER; note = 2'-O-methyladenosine-3'-phosphate
  modified_base 9: mod_base = OTHER; note = 2'-O-methylcytidine-3'-phosphate
  modified_base 10: mod_base = OTHER; note = 2'-O-methyladenosine-3'-phosphate
  modified_base 11: mod_base = OTHER; note = 2'-O-methyladenosine-3'-phosphate
  modified_base 12: mod_base = OTHER; note = 2'-O-methyladenosine-3'-phosphate
  modified_base 13: mod_base = OTHER; note = 2'-O-methylcytidine-3'-phosphate
  modified_base 14: mod_base = OTHER; note = 2'-deoxy-2'-fluorocytidine-3'-phosphate
  modified_base 15: mod_base = OTHER; note = 2'-O-methyluridine-3'-phosphate
  modified_base 16: mod_base = OTHER; note = 2'-deoxy-2'-fluorouridine-3'-phosphate
  modified_base 17: mod_base = OTHER; note = 2'-O-methylguanosine-3'-phosphate
  modified_base 18: mod_base = OTHER; note = 2'-O-methyladenosine-3'-phosphate
  modified_base 19: mod_base = OTHER; note = 2'-O-methyladenosine-3'-phosphate
  modified_base 20: mod_base = OTHER; note = 2'-O-methyladenosine-3'-phosphate
  modified_base 21: mod_base = OTHER; note = 2'-O-methylcytidine-3'-phosphate
  modified_base 22: mod_base = OTHER; note = 2'-O-methyladenosine-3'-phosphate
  modified_base 23: mod_base = OTHER; note = 2'-O-methylcytidine
tcaagtaacaaaccttgaaacac

SEQ ID NO: 5289 - RNA, 23 nt, synthetic construct
  source 1..23: mol_type = other RNA
  modified_base 1: mod_base = OTHER; note = 2'-O-methyluridine-3'-phosphate 5'phosphate
  modified_base 2: mod_base = OTHER; note = 2'-deoxy-2'-fluorocytidine-3'-phosphate
  modified_base 3: mod_base = OTHER; note = 2'-O-methylcytidine-3'-phosphate
  modified_base 4: mod_base = OTHER; note = 2'-O-methyladenosine-3'-phosphate
  modified_base 5: mod_base = OTHER; note = 2'-O-methyladenosine-3'-phosphate
  modified_base 6: mod_base = OTHER; note = 2'-deoxy-2'-fluoroguanosine-3'-phosphate
  modified_base 7: mod_base = OTHER; note = 2'-O-methyluridine-3'-phosphate
  modified_base 8: mod_base = OTHER; note = 2'-O-methyladenosine-3'-phosphate
  modified_base 9: mod_base = OTHER; note = 2'-O-methyladenosine-3'-phosphate
  modified_base 10: mod_base = OTHER; note = 2'-O-methylcytidine-3'-phosphate
  modified_base 11: mod_base = OTHER; note = 2'-O-methyladenosine-3'-phosphate
  modified_base 12: mod_base = OTHER; note = 2'-O-methyladenosine-3'-phosphate
  modified_base 13: mod_base = OTHER; note = 2'-O-methyladenosine-3'-phosphate
  modified_base 14: mod_base = OTHER; note = 2'-deoxy-2'-fluorocytidine-3'-phosphate
  modified_base 15: mod_base = OTHER; note = 2'-O-methylcytidine-3'-phosphate
  modified_base 16: mod_base = OTHER; note = 2'-deoxy-2'-fluorouridine-3'-phosphate
  modified_base 17: mod_base = OTHER; note = 2'-O-methyluridine-3'-phosphate
  modified_base 18: mod_base = OTHER; note = 2'-O-methylguanosine-3'-phosphate
  modified_base 19: mod_base = OTHER; note = 2'-O-methyladenosine-3'-phosphate
  modified_base 20: mod_base = OTHER; note = 2'-O-methyladenosine-3'-phosphate
  modified_base 21: mod_base = OTHER; note = 2'-O-methyladenosine-3'-phosphate
  modified_base 22: mod_base = OTHER; note = 2'-O-methylcytidine-3'-phosphate
  modified_base 23: mod_base = OTHER; note = 2'-O-methyladenosine
tccaagtaacaaaccttgaaaca

SEQ ID NO: 5290 - RNA, 23 nt, synthetic construct
  source 1..23: mol_type = other RNA
  modified_base 1: mod_base = OTHER; note = 2'-O-methyluridine-3'-phosphate 5'phosphate
  modified_base 2: mod_base = OTHER; note = 2'-deoxy-2'-fluorouridine-3'-phosphate
  modified_base 3: mod_base = OTHER; note = 2'-O-methylcytidine-3'-phosphate
  modified_base 4: mod_base = OTHER; note = 2'-O-methylcytidine-3'-phosphate
  modified_base 5: mod_base = OTHER; note = 2'-O-methyladenosine-3'-phosphate
  modified_base 6: mod_base = OTHER; note = 2'-deoxy-2'-fluoroadenosine-3'-phosphate
  modified_base 7: mod_base = OTHER; note = 2'-O-methylguanosine-3'-phosphate
  modified_base 8: mod_base = OTHER; note = 2'-O-methyluridine-3'-phosphate
  modified_base 9: mod_base = OTHER; note = 2'-O-methyladenosine-3'-phosphate
  modified_base 10: mod_base = OTHER; note = 2'-O-methyladenosine-3'-phosphate
  modified_base 11: mod_base = OTHER; note = 2'-O-methylcytidine-3'-phosphate
  modified_base 12: mod_base = OTHER; note = 2'-O-methyladenosine-3'-phosphate
  modified_base 13: mod_base = OTHER; note = 2'-O-methyladenosine-3'-phosphate
  modified_base 14: mod_base = OTHER; note = 2'-deoxy-2'-fluoroadenosine-3'-phosphate
  modified_base 15: mod_base = OTHER; note = 2'-O-methylcytidine-3'-phosphate
  modified_base 16: mod_base = OTHER; note = 2'-deoxy-2'-fluorocytidine-3'-phosphate
  modified_base 17: mod_base = OTHER; note = 2'-O-methyluridine-3'-phosphate
  modified_base 18: mod_base = OTHER; note = 2'-O-methyluridine-3'-phosphate
  modified_base 19: mod_base = OTHER; note = 2'-O-methylguanosine-3'-phosphate
  modified_base 20: mod_base = OTHER; note = 2'-O-methyladenosine-3'-phosphate
  modified_base 21: mod_base = OTHER; note = 2'-O-methyladenosine-3'-phosphate
  modified_base 22: mod_base = OTHER; note = 2'-O-methyladenosine-3'-phosphate
  modified_base 23: mod_base = OTHER; note = 2'-O-methylcytidine
ttccaagtaacaaaccttgaaac

SEQ ID NO: 5291 - RNA, 23 nt, synthetic construct
  source 1..23: mol_type = other RNA
  modified_base 1: mod_base = OTHER; note = 2'-O-methyluridine-3'-phosphate 5'phosphate
  modified_base 2: mod_base = OTHER; note = 2'-deoxy-2'-fluoroadenosine-3'-phosphate
  modified_base 3: mod_base = OTHER; note = 2'-O-methyluridine-3'-phosphate
  modified_base 4: mod_base = OTHER; note = 2'-O-methylcytidine-3'-phosphate
  modified_base 5: mod_base = OTHER; note = 2'-O-methylcytidine-3'-phosphate
  modified_base 6: mod_base = OTHER; note = 2'-deoxy-2'-fluoroadenosine-3'-phosphate
  modified_base 7: mod_base = OTHER; note = 2'-O-methyladenosine-3'-phosphate
  modified_base 8: mod_base = OTHER; note = 2'-O-methylguanosine-3'-phosphate
  modified_base 9: mod_base = OTHER; note = 2'-O-methyluridine-3'-phosphate
  modified_base 10: mod_base = OTHER; note = 2'-O-methyladenosine-3'-phosphate
  modified_base 11: mod_base = OTHER; note = 2'-O-methyladenosine-3'-phosphate
  modified_base 12: mod_base = OTHER; note = 2'-O-methylcytidine-3'-phosphate
  modified_base 13: mod_base = OTHER; note = 2'-O-methyladenosine-3'-phosphate
  modified_base 14: mod_base = OTHER; note = 2'-deoxy-2'-fluoroadenosine-3'-phosphate
  modified_base 15: mod_base = OTHER; note = 2'-O-methyladenosine-3'-phosphate
  modified_base 16: mod_base = OTHER; note = 2'-deoxy-2'-fluorocytidine-3'-phosphate
  modified_base 17: mod_base = OTHER; note = 2'-O-methylcytidine-3'-phosphate
  modified_base 18: mod_base = OTHER; note = 2'-O-methyluridine-3'-phosphate
  modified_base 19: mod_base = OTHER; note = 2'-O-methyluridine-3'-phosphate
  modified_base 20: mod_base = OTHER; note = 2'-O-methylguanosine-3'-phosphate
  modified_base 21: mod_base = OTHER; note = 2'-O-methyladenosine-3'-phosphate
  modified_base 22: mod_base = OTHER; note = 2'-O-methyladenosine-3'-phosphate
  modified_base 23: mod_base = OTHER; note = 2'-O-methyladenosine
tatccaagtaacaaaccttgaaa

SEQ ID NO: 5292 - RNA, 23 nt, synthetic construct
  source 1..23: mol_type = other RNA
  modified_base 1: mod_base = OTHER; note = 2'-O-methyluridine-3'-phosphate 5'phosphate
  modified_base 2: mod_base = OTHER; note = 2'-deoxy-2'-fluorocytidine-3'-phosphate
  modified_base 3: mod_base = OTHER; note = 2'-O-methyluridine-3'-phosphate
  modified_base 4: mod_base = OTHER; note = 2'-O-methylcytidine-3'-phosphate
  modified_base 5: mod_base = OTHER; note = 2'-O-methylcytidine-3'-phosphate
  modified_base 6: mod_base = OTHER; note = 2'-deoxy-2'-fluorocytidine-3'-phosphate
  modified_base 7: mod_base = OTHER; note = 2'-O-methyluridine-3'-phosphate
  modified_base 8: mod_base = OTHER; note = 2'-O-methylcytidine-3'-phosphate
  modified_base 9: mod_base = OTHER; note = 2'-O-methyladenosine-3'-phosphate
  modified_base 10: mod_base = OTHER; note = 2'-O-methyladenosine-3'-phosphate
  modified_base 11: mod_base = OTHER; note = 2'-O-methyluridine-3'-phosphate
  modified_base 12: mod_base = OTHER; note = 2'-O-methylcytidine-3'-phosphate
  modified_base 13: mod_base = OTHER; note = 2'-O-methylcytidine-3'-phosphate
  modified_base 14: mod_base = OTHER; note = 2'-deoxy-2'-fluoroadenosine-3'-phosphate
  modified_base 15: mod_base = OTHER; note = 2'-O-methyladenosine-3'-phosphate
  modified_base 16: mod_base = OTHER; note = 2'-deoxy-2'-fluoroguanosine-3'-phosphate
  modified_base 17: mod_base = OTHER; note = 2'-O-methyluridine-3'-phosphate
  modified_base 18: mod_base = OTHER; note = 2'-O-methyladenosine-3'-phosphate
  modified_base 19: mod_base = OTHER; note = 2'-O-methyladenosine-3'-phosphate
  modified_base 20: mod_base = OTHER; note = 2'-O-methylcytidine-3'-phosphate
  modified_base 21: mod_base = OTHER; note = 2'-O-methyladenosine-3'-phosphate
  modified_base 22: mod_base = OTHER; note = 2'-O-methyladenosine-3'-phosphate
  modified_base 23: mod_base = OTHER; note = 2'-O-methyladenosine
tctccctcaatccaagtaacaaa

SEQ ID NO: 5293 - RNA, 23 nt, synthetic construct
  source 1..23: mol_type = other RNA
  modified_base 1: mod_base = OTHER; note = 2'-O-methyluridine-3'-phosphate 5'phosphate
  modified_base 2: mod_base = OTHER; note = 2'-deoxy-2'-fluoroadenosine-3'-phosphate
  modified_base 3: mod_base = OTHER; note = 2'-O-methylcytidine-3'-phosphate
  modified_base 4: mod_base = OTHER; note = 2'-O-methyluridine-3'-phosphate
  modified_base 5: mod_base = OTHER; note = 2'-O-methylcytidine-3'-phosphate
  modified_base 6: mod_base = OTHER; note = 2'-deoxy-2'-fluorocytidine-3'-phosphate
  modified_base 7: mod_base = OTHER; note = 2'-O-methylcytidine-3'-phosphate
  modified_base 8: mod_base = OTHER; note = 2'-O-methyluridine-3'-phosphate
  modified_base 9: mod_base = OTHER; note = 2'-O-methylcytidine-3'-phosphate
  modified_base 10: mod_base = OTHER; note = 2'-O-methyladenosine-3'-phosphate
  modified_base 11: mod_base = OTHER; note = 2'-O-methyladenosine-3'-phosphate
  modified_base 12: mod_base = OTHER; note = 2'-O-methyluridine-3'-phosphate
  modified_base 13: mod_base = OTHER; note = 2'-O-methylcytidine-3'-phosphate
  modified_base 14: mod_base = OTHER; note = 2'-deoxy-2'-fluorocytidine-3'-phosphate
  modified_base 15: mod_base = OTHER; note = 2'-O-methyladenosine-3'-phosphate
  modified_base 16: mod_base = OTHER; note = 2'-deoxy-2'-fluoroadenosine-3'-phosphate
  modified_base 17: mod_base = OTHER; note = 2'-O-methylguanosine-3'-phosphate
  modified_base 18: mod_base = OTHER; note = 2'-O-methyluridine-3'-phosphate
  modified_base 19: mod_base = OTHER; note = 2'-O-methyladenosine-3'-phosphate
  modified_base 20: mod_base = OTHER; note = 2'-O-methyladenosine-3'-phosphate
  modified_base 21: mod_base = OTHER; note = 2'-O-methylcytidine-3'-phosphate
  modified_base 22: mod_base = OTHER; note = 2'-O-methyladenosine-3'-phosphate
  modified_base 23: mod_base = OTHER; note = 2'-O-methyladenosine
tactccctcaatccaagtaacaa

SEQ ID NO: 5294 - RNA, 23 nt, synthetic construct
  source 1..23: mol_type = other RNA
  modified_base 1: mod_base = OTHER; note = 2'-O-methyluridine-3'-phosphate 5'phosphate
  modified_base 2: mod_base = OTHER; note = 2'-deoxy-2'-fluorouridine-3'-phosphate
  modified_base 3: mod_base = OTHER; note = 2'-O-methylcytidine-3'-phosphate
  modified_base 4: mod_base = OTHER; note = 2'-O-methyladenosine-3'-phosphate
  modified_base 5: mod_base = OTHER; note = 2'-O-methylcytidine-3'-phosphate
  modified_base 6: mod_base = OTHER; note = 2'-deoxy-2'-fluorouridine-3'-phosphate
  modified_base 7: mod_base = OTHER; note = 2'-O-methylcytidine-3'-phosphate
  modified_base 8: mod_base = OTHER; note = 2'-O-methylcytidine-3'-phosphate
  modified_base 9: mod_base = OTHER; note = 2'-O-methylcytidine-3'-phosphate
  modified_base 10: mod_base = OTHER; note = 2'-O-methyluridine-3'-phosphate
  modified_base 11: mod_base = OTHER; note = 2'-O-methylcytidine-3'-phosphate
  modified_base 12: mod_base = OTHER; note = 2'-O-methyladenosine-3'-phosphate
  modified_base 13: mod_base = OTHER; note = 2'-O-methyladenosine-3'-phosphate
  modified_base 14: mod_base = OTHER; note = 2'-deoxy-2'-fluorouridine-3'-phosphate
  modified_base 15: mod_base = OTHER; note = 2'-O-methylcytidine-3'-phosphate
  modified_base 16: mod_base = OTHER; note = 2'-deoxy-2'-fluorocytidine-3'-phosphate
  modified_base 17: mod_base = OTHER; note = 2'-O-methyladenosine-3'-phosphate
  modified_base 18: mod_base = OTHER; note = 2'-O-methyladenosine-3'-phosphate
  modified_base 19: mod_base = OTHER; note = 2'-O-methylguanosine-3'-phosphate
  modified_base 20: mod_base = OTHER; note = 2'-O-methyluridine-3'-phosphate
  modified_base 21: mod_base = OTHER; note = 2'-O-methyladenosine-3'-phosphate
  modified_base 22: mod_base = OTHER; note = 2'-O-methyladenosine-3'-phosphate
  modified_base 23: mod_base = OTHER; note = 2'-O-methylcytidine
ttcactccctcaatccaagtaac

SEQ ID NO: 5295 - RNA, 23 nt, synthetic construct
  source 1..23: mol_type = other RNA
  modified_base 1: mod_base = OTHER; note = 2'-O-methyluridine-3'-phosphate 5'phosphate
  modified_base 2: mod_base = OTHER; note = 2'-deoxy-2'-fluoroadenosine-3'-phosphate
  modified_base 3: mod_base = OTHER; note = 2'-O-methyluridine-3'-phosphate
  modified_base 4: mod_base = OTHER; note = 2'-O-methylcytidine-3'-phosphate
  modified_base 5: mod_base = OTHER; note = 2'-O-methyladenosine-3'-phosphate
  modified_base 6: mod_base = OTHER; note = 2'-deoxy-2'-fluorocytidine-3'-phosphate
  modified_base 7: mod_base = OTHER; note = 2'-O-methyluridine-3'-phosphate
  modified_base 8: mod_base = OTHER; note = 2'-O-methylcytidine-3'-phosphate
  modified_base 9: mod_base = OTHER; note = 2'-O-methylcytidine-3'-phosphate
  modified_base 10: mod_base = OTHER; note = 2'-O-methylcytidine-3'-phosphate
  modified_base 11: mod_base = OTHER; note = 2'-O-methyluridine-3'-phosphate
  modified_base 12: mod_base = OTHER; note = 2'-O-methylcytidine-3'-phosphate
  modified_base 13: mod_base = OTHER; note = 2'-O-methyladenosine-3'-phosphate
  modified_base 14: mod_base = OTHER; note = 2'-deoxy-2'-fluoroadenosine-3'-phosphate
  modified_base 15: mod_base = OTHER; note = 2'-O-methyluridine-3'-phosphate
  modified_base 16: mod_base = OTHER; note = 2'-deoxy-2'-fluorocytidine-3'-phosphate
  modified_base 17: mod_base = OTHER; note = 2'-O-methylcytidine-3'-phosphate
  modified_base 18: mod_base = OTHER; note = 2'-O-methyladenosine-3'-phosphate
  modified_base 19: mod_base = OTHER; note = 2'-O-methyladenosine-3'-phosphate
  modified_base 20: mod_base = OTHER; note = 2'-O-methylguanosine-3'-phosphate
  modified_base 21: mod_base = OTHER; note = 2'-O-methyluridine-3'-phosphate
  modified_base 22: mod_base = OTHER; note = 2'-O-methyladenosine-3'-phosphate
  modified_base 23: mod_base = OTHER; note = 2'-O-methyladenosine
tatcactccctcaatccaagtaa

SEQ ID NO: 5296 - RNA, 23 nt, synthetic construct
  source 1..23: mol_type = other RNA
  modified_base 1: mod_base = OTHER; note = 2'-O-methyluridine-3'-phosphate 5'phosphate
  modified_base 2: mod_base = OTHER; note = 2'-deoxy-2'-fluorocytidine-3'-phosphate
  modified_base 3: mod_base = OTHER; note = 2'-O-methyladenosine-3'-phosphate
  modified_base 4: mod_base = OTHER; note = 2'-O-methyluridine-3'-phosphate
  modified_base 5: mod_base = OTHER; note = 2'-O-methylcytidine-3'-phosphate
  modified_base 6: mod_base = OTHER; note = 2'-deoxy-2'-fluoroadenosine-3'-phosphate
  modified_base 7: mod_base = OTHER; note = 2'-O-methylcytidine-3'-phosphate
  modified_base 8: mod_base = OTHER; note = 2'-O-methyluridine-3'-phosphate
  modified_base 9: mod_base = OTHER; note = 2'-O-methylcytidine-3'-phosphate
  modified_base 10: mod_base = OTHER; note = 2'-O-methylcytidine-3'-phosphate
  modified_base 11: mod_base = OTHER; note = 2'-O-methylcytidine-3'-phosphate
  modified_base 12: mod_base = OTHER; note = 2'-O-methyluridine-3'-phosphate
  modified_base 13: mod_base = OTHER; note = 2'-O-methylcytidine-3'-phosphate
  modified_base 14: mod_base = OTHER; note = 2'-deoxy-2'-fluoroadenosine-3'-phosphate
  modified_base 15: mod_base = OTHER; note = 2'-O-methyladenosine-3'-phosphate
  modified_base 16: mod_base = OTHER; note = 2'-deoxy-2'-fluorouridine-3'-phosphate
  modified_base 17: mod_base = OTHER; note = 2'-O-methylcytidine-3'-phosphate
  modified_base 18: mod_base = OTHER; note = 2'-O-methylcytidine-3'-phosphate
  modified_base 19: mod_base = OTHER; note = 2'-O-methyladenosine-3'-phosphate
  modified_base 20: mod_base = OTHER; note = 2'-O-methyladenosine-3'-phosphate
  modified_base 21: mod_base = OTHER; note = 2'-O-methylguanosine-3'-phosphate
  modified_base 22: mod_base = OTHER; note = 2'-O-methyluridine-3'-phosphate
  modified_base 23: mod_base = OTHER; note = 2'-O-methyladenosine
tcatcactccctcaatccaagta

SEQ ID NO: 5297 - RNA, 23 nt, synthetic construct
  source 1..23: mol_type = other RNA
  modified_base 1: mod_base = OTHER; note = 2'-O-methyluridine-3'-phosphate 5'phosphate
  modified_base 2: mod_base = OTHER; note = 2'-deoxy-2'-fluorouridine-3'-phosphate
  modified_base 3: mod_base = OTHER; note = 2'-O-methylcytidine-3'-phosphate
  modified_base 4: mod_base = OTHER; note = 2'-O-methyladenosine-3'-phosphate
  modified_base 5: mod_base = OTHER; note = 2'-O-methyluridine-3'-phosphate
  modified_base 6: mod_base = OTHER; note = 2'-deoxy-2'-fluorocytidine-3'-phosphate
  modified_base 7: mod_base = OTHER; note = 2'-O-methyladenosine-3'-phosphate
  modified_base 8: mod_base = OTHER; note = 2'-O-methylcytidine-3'-phosphate
  modified_base 9: mod_base = OTHER; note = 2'-O-methyluridine-3'-phosphate
  modified_base 10: mod_base = OTHER; note = 2'-O-methylcytidine-3'-phosphate
  modified_base 11: mod_base = OTHER; note = 2'-O-methylcytidine-3'-phosphate
  modified_base 12: mod_base = OTHER; note = 2'-O-methylcytidine-3'-phosphate
  modified_base 13: mod_base = OTHER; note = 2'-O-methyluridine-3'-phosphate
  modified_base 14: mod_base = OTHER; note = 2'-deoxy-2'-fluorocytidine-3'-phosphate
  modified_base 15: mod_base = OTHER; note = 2'-O-methyladenosine-3'-phosphate
  modified_base 16: mod_base = OTHER; note = 2'-deoxy-2'-fluoroadenosine-3'-phosphate
  modified_base 17: mod_base = OTHER; note = 2'-O-methyluridine-3'-phosphate
  modified_base 18: mod_base = OTHER; note = 2'-O-methylcytidine-3'-phosphate
  modified_base 19: mod_base = OTHER; note = 2'-O-methylcytidine-3'-phosphate
  modified_base 20: mod_base = OTHER; note = 2'-O-methyladenosine-3'-phosphate
  modified_base 21: mod_base = OTHER; note = 2'-O-methyladenosine-3'-phosphate
  modified_base 22: mod_base = OTHER; note = 2'-O-methylguanosine-3'-phosphate
  modified_base 23: mod_base = OTHER; note = 2'-O-methyluridine
ttcatcactccctcaatccaagt

SEQ ID NO: 5298 - RNA, 23 nt, synthetic construct
  source 1..23: mol_type = other RNA
  modified_base 1: mod_base = OTHER; note = 2'-O-methyluridine-3'-phosphate 5'phosphate
  modified_base 2: mod_base = OTHER; note = 2'-deoxy-2'-fluorocytidine-3'-phosphate
  modified_base 3: mod_base = OTHER; note = 2'-O-methyluridine-3'-phosphate
  modified_base 4: mod_base = OTHER; note = 2'-O-methylcytidine-3'-phosphate
  modified_base 5: mod_base = OTHER; note = 2'-O-methyladenosine-3'-phosphate
  modified_base 6: mod_base = OTHER; note = 2'-deoxy-2'-fluorouridine-3'-phosphate
  modified_base 7: mod_base = OTHER; note = 2'-O-methylcytidine-3'-phosphate
  modified_base 8: mod_base = OTHER; note = 2'-O-methyladenosine-3'-phosphate
  modified_base 9: mod_base = OTHER; note = 2'-O-methylcytidine-3'-phosphate
  modified_base 10: mod_base = OTHER; note = 2'-O-methyluridine-3'-phosphate
  modified_base 11: mod_base = OTHER; note = 2'-O-methylcytidine-3'-phosphate
  modified_base 12: mod_base = OTHER; note = 2'-O-methylcytidine-3'-phosphate
  modified_base 13: mod_base = OTHER; note = 2'-O-methylcytidine-3'-phosphate
  modified_base 14: mod_base = OTHER; note = 2'-deoxy-2'-fluorouridine-3'-phosphate
  modified_base 15: mod_base = OTHER; note = 2'-O-methylcytidine-3'-phosphate
  modified_base 16: mod_base = OTHER; note = 2'-deoxy-2'-fluoroadenosine-3'-phosphate
  modified_base 17: mod_base = OTHER; note = 2'-O-methyladenosine-3'-phosphate
  modified_base 18: mod_base = OTHER; note = 2'-O-methyluridine-3'-phosphate
  modified_base 19: mod_base = OTHER; note = 2'-O-methylcytidine-3'-phosphate
  modified_base 20: mod_base = OTHER; note = 2'-O-methylcytidine-3'-phosphate
  modified_base 21: mod_base = OTHER; note = 2'-O-methyladenosine-3'-phosphate
  modified_base 22: mod_base = OTHER; note = 2'-O-methyladenosine-3'-phosphate
  modified_base 23: mod_base = OTHER; note = 2'-O-methylguanosine
tctcatcactccctcaatccaag

SEQ ID NO: 5299 - RNA, 23 nt, synthetic construct
  source 1..23: mol_type = other RNA
  modified_base 1: mod_base = OTHER; note = 2'-O-methyluridine-3'-phosphate 5'phosphate
  modified_base 2: mod_base = OTHER; note = 2'-deoxy-2'-fluorouridine-3'-phosphate
  modified_base 3: mod_base = OTHER; note = 2'-O-methylcytidine-3'-phosphate
  modified_base 4: mod_base = OTHER; note = 2'-O-methyluridine-3'-phosphate
  modified_base 5: mod_base = OTHER; note = 2'-O-methylcytidine-3'-phosphate
  modified_base 6: mod_base = OTHER; note = 2'-deoxy-2'-fluoroadenosine-3'-phosphate
  modified_base 7: mod_base = OTHER; note = 2'-O-methyluridine-3'-phosphate
  modified_base 8: mod_base = OTHER; note = 2'-O-methylcytidine-3'-phosphate
  modified_base 9: mod_base = OTHER; note = 2'-O-methyladenosine-3'-phosphate
  modified_base 10: mod_base = OTHER; note = 2'-O-methylcytidine-3'-phosphate
  modified_base 11: mod_base = OTHER; note = 2'-O-methyluridine-3'-phosphate
  modified_base 12: mod_base = OTHER; note = 2'-O-methylcytidine-3'-phosphate
  modified_base 13: mod_base = OTHER; note = 2'-O-methylcytidine-3'-phosphate
  modified_base 14: mod_base = OTHER; note = 2'-deoxy-2'-fluorocytidine-3'-phosphate
  modified_base 15: mod_base = OTHER; note = 2'-O-methyluridine-3'-phosphate
  modified_base 16: mod_base = OTHER; note = 2'-deoxy-2'-fluorocytidine-3'-phosphate
  modified_base 17: mod_base = OTHER; note = 2'-O-methyladenosine-3'-phosphate
  modified_base 18: mod_base = OTHER; note = 2'-O-methyladenosine-3'-phosphate
  modified_base 19: mod_base = OTHER; note = 2'-O-methyluridine-3'-phosphate
  modified_base 20: mod_base = OTHER; note = 2'-O-methylcytidine-3'-phosphate
  modified_base 21: mod_base = OTHER; note = 2'-O-methylcytidine-3'-phosphate
  modified_base 22: mod_base = OTHER; note = 2'-O-methyladenosine-3'-phosphate
  modified_base 23: mod_base = OTHER; note = 2'-O-methyladenosine
ttctcatcactccctcaatccaa

SEQ ID NO: 5300 - RNA, 23 nt, synthetic construct
  source 1..23: mol_type = other RNA
  modified_base 1: mod_base = OTHER; note = 2'-O-methyluridine-3'-phosphate 5'phosphate
  modified_base 2: mod_base = OTHER; note = 2'-deoxy-2'-fluorouridine-3'-phosphate
  modified_base 3: mod_base = OTHER; note = 2'-O-methyluridine-3'-phosphate
  modified_base 4: mod_base = OTHER; note = 2'-O-methylcytidine-3'-phosphate
  modified_base 5: mod_base = OTHER; note = 2'-O-methyluridine-3'-phosphate
  modified_base 6: mod_base = OTHER; note = 2'-deoxy-2'-fluorocytidine-3'-phosphate
  modified_base 7: mod_base = OTHER; note = 2'-O-methyladenosine-3'-phosphate
  modified_base 8: mod_base = OTHER; note = 2'-O-methyluridine-3'-phosphate
  modified_base 9: mod_base = OTHER; note = 2'-O-methylcytidine-3'-phosphate
  modified_base 10: mod_base = OTHER; note = 2'-O-methyladenosine-3'-phosphate
  modified_base 11: mod_base = OTHER; note = 2'-O-methylcytidine-3'-phosphate
  modified_base 12: mod_base = OTHER; note = 2'-O-methyluridine-3'-phosphate
  modified_base 13: mod_base = OTHER; note = 2'-O-methylcytidine-3'-phosphate
  modified_base 14: mod_base = OTHER; note = 2'-deoxy-2'-fluorocytidine-3'-phosphate
  modified_base 15: mod_base = OTHER; note = 2'-O-methylcytidine-3'-phosphate
  modified_base 16: mod_base = OTHER; note = 2'-deoxy-2'-fluorouridine-3'-phosphate
  modified_base 17: mod_base = OTHER; note = 2'-O-methylcytidine-3'-phosphate
  modified_base 18: mod_base = OTHER; note = 2'-O-methyladenosine-3'-phosphate
  modified_base 19: mod_base = OTHER; note = 2'-O-methyladenosine-3'-phosphate
  modified_base 20: mod_base = OTHER; note = 2'-O-methyluridine-3'-phosphate
  modified_base 21: mod_base = OTHER; note = 2'-O-methylcytidine-3'-phosphate
  modified_base 22: mod_base = OTHER; note = 2'-O-methylcytidine-3'-phosphate
  modified_base 23: mod_base = OTHER; note = 2'-O-methyladenosine
tttctcatcactccctcaatcca

SEQ ID NO: 5301 - RNA, 23 nt, synthetic construct
  source 1..23: mol_type = other RNA
  modified_base 1: mod_base = OTHER; note = 2'-O-methyluridine-3'-phosphate 5'phosphate
  modified_base 2: mod_base = OTHER; note = 2'-deoxy-2'-fluorouridine-3'-phosphate
  modified_base 3: mod_base = OTHER; note = 2'-O-methyluridine-3'-phosphate
  modified_base 4: mod_base = OTHER; note = 2'-O-methyluridine-3'-phosphate
  modified_base 5: mod_base = OTHER; note = 2'-O-methylcytidine-3'-phosphate
  modified_base 6: mod_base = OTHER; note = 2'-deoxy-2'-fluorouridine-3'-phosphate
  modified_base 7: mod_base = OTHER; note = 2'-O-methylcytidine-3'-phosphate
  modified_base 8: mod_base = OTHER; note = 2'-O-methyladenosine-3'-phosphate
  modified_base 9: mod_base = OTHER; note = 2'-O-methyluridine-3'-phosphate
  modified_base 10: mod_base = OTHER; note = 2'-O-methylcytidine-3'-phosphate
  modified_base 11: mod_base = OTHER; note = 2'-O-methyladenosine-3'-phosphate
  modified_base 12: mod_base = OTHER; note = 2'-O-methylcytidine-3'-phosphate
  modified_base 13: mod_base = OTHER; note = 2'-O-methyluridine-3'-phosphate
  modified_base 14: mod_base = OTHER; note = 2'-deoxy-2'-fluorocytidine-3'-phosphate
  modified_base 15: mod_base = OTHER; note = 2'-O-methylcytidine-3'-phosphate
  modified_base 16: mod_base = OTHER; note = 2'-deoxy-2'-fluorocytidine-3'-phosphate
  modified_base 17: mod_base = OTHER; note = 2'-O-methyluridine-3'-phosphate
  modified_base 18: mod_base = OTHER; note = 2'-O-methylcytidine-3'-phosphate
  modified_base 19: mod_base = OTHER; note = 2'-O-methyladenosine-3'-phosphate
  modified_base 20: mod_base = OTHER; note = 2'-O-methyladenosine-3'-phosphate
  modified_base 21: mod_base = OTHER; note = 2'-O-methyluridine-3'-phosphate
  modified_base 22: mod_base = OTHER; note = 2'-O-methylcytidine-3'-phosphate
  modified_base 23: mod_base = OTHER; note = 2'-O-methylcytidine
ttttctcatcactccctcaatcc

SEQ ID NO: 5302 - RNA, 23 nt, synthetic construct
  source 1..23: mol_type = other RNA
  modified_base 1: mod_base = OTHER; note = 2'-O-methyluridine-3'-phosphate 5'phosphate
  modified_base 2: mod_base = OTHER; note = 2'-deoxy-2'-fluoroadenosine-3'-phosphate
  modified_base 3: mod_base = OTHER; note = 2'-O-methyluridine-3'-phosphate
  modified_base 4: mod_base = OTHER; note = 2'-O-methyluridine-3'-phosphate
  modified_base 5: mod_base = OTHER; note = 2'-O-methyluridine-3'-phosphate
  modified_base 6: mod_base = OTHER; note = 2'-deoxy-2'-fluorocytidine-3'-phosphate
  modified_base 7: mod_base = OTHER; note = 2'-O-methyluridine-3'-phosphate
  modified_base 8: mod_base = OTHER; note = 2'-O-methylcytidine-3'-phosphate
  modified_base 9: mod_base = OTHER; note = 2'-O-methyladenosine-3'-phosphate
  modified_base 10: mod_base = OTHER; note = 2'-O-methyluridine-3'-phosphate
  modified_base 11: mod_base = OTHER; note = 2'-O-methylcytidine-3'-phosphate
  modified_base 12: mod_base = OTHER; note = 2'-O-methyladenosine-3'-phosphate
  modified_base 13: mod_base = OTHER; note = 2'-O-methylcytidine-3'-phosphate
  modified_base 14: mod_base = OTHER; note = 2'-deoxy-2'-fluorouridine-3'-phosphate
  modified_base 15: mod_base = OTHER; note = 2'-O-methylcytidine-3'-phosphate
  modified_base 16: mod_base = OTHER; note = 2'-deoxy-2'-fluorocytidine-3'-phosphate
  modified_base 17: mod_base = OTHER; note = 2'-O-methylcytidine-3'-phosphate
  modified_base 18: mod_base = OTHER; note = 2'-O-methyluridine-3'-phosphate
  modified_base 19: mod_base = OTHER; note = 2'-O-methylcytidine-3'-phosphate
  modified_base 20: mod_base = OTHER; note = 2'-O-methyladenosine-3'-phosphate
  modified_base 21: mod_base = OTHER; note = 2'-O-methyladenosine-3'-phosphate
  modified_base 22: mod_base = OTHER; note = 2'-O-methyluridine-3'-phosphate
  modified_base 23: mod_base = OTHER; note = 2'-O-methylcytidine
tatttctcatcactccctcaatc

SEQ ID NO: 5303 - RNA, 23 nt, synthetic construct
  source 1..23: mol_type = other RNA
  modified_base 1: mod_base = OTHER; note = 2'-O-methyluridine-3'-phosphate 5'phosphate
  modified_base 2: mod_base = OTHER; note = 2'-deoxy-2'-fluorouridine-3'-phosphate
  modified_base 3: mod_base = OTHER; note = 2'-O-methyladenosine-3'-phosphate
  modified_base 4: mod_base = OTHER; note = 2'-O-methyluridine-3'-phosphate
  modified_base 5: mod_base = OTHER; note = 2'-O-methyluridine-3'-phosphate
  modified_base 6: mod_base = OTHER; note = 2'-deoxy-2'-fluorouridine-3'-phosphate
  modified_base 7: mod_base = OTHER; note = 2'-O-methylcytidine-3'-phosphate
  modified_base 8: mod_base = OTHER; note = 2'-O-methyluridine-3'-phosphate
  modified_base 9: mod_base = OTHER; note = 2'-O-methylcytidine-3'-phosphate
  modified_base 10: mod_base = OTHER; note = 2'-O-methyladenosine-3'-phosphate
  modified_base 11: mod_base = OTHER; note = 2'-O-methyluridine-3'-phosphate
  modified_base 12: mod_base = OTHER; note = 2'-O-methylcytidine-3'-phosphate
  modified_base 13: mod_base = OTHER; note = 2'-O-methyladenosine-3'-phosphate
  modified_base 14: mod_base = OTHER; note = 2'-deoxy-2'-fluorocytidine-3'-phosphate
  modified_base 15: mod_base = OTHER; note = 2'-O-methyluridine-3'-phosphate
  modified_base 16: mod_base = OTHER; note = 2'-deoxy-2'-fluorocytidine-3'-phosphate
  modified_base 17: mod_base = OTHER; note = 2'-O-methylcytidine-3'-phosphate
  modified_base 18: mod_base = OTHER; note = 2'-O-methylcytidine-3'-phosphate
  modified_base 19: mod_base = OTHER; note = 2'-O-methyluridine-3'-phosphate
  modified_base 20: mod_base = OTHER; note = 2'-O-methylcytidine-3'-phosphate
  modified_base 21: mod_base = OTHER; note = 2'-O-methyladenosine-3'-phosphate
  modified_base 22: mod_base = OTHER; note = 2'-O-methyladenosine-3'-phosphate
  modified_base 23: mod_base = OTHER; note = 2'-O-methyluridine
ttatttctcatcactccctcaat

SEQ ID NO: 5304 - RNA, 23 nt, synthetic construct
  source 1..23: mol_type = other RNA
  modified_base 1: mod_base = OTHER; note = 2'-O-methyluridine-3'-phosphate 5'phosphate
  modified_base 2: mod_base = OTHER; note = 2'-deoxy-2'-fluorouridine-3'-phosphate
  modified_base 3: mod_base = OTHER; note = 2'-O-methyluridine-3'-phosphate
  modified_base 4: mod_base = OTHER; note = 2'-O-methyladenosine-3'-phosphate
  modified_base 5: mod_base = OTHER; note = 2'-O-methyluridine-3'-phosphate
  modified_base 6: mod_base = OTHER; note = 2'-deoxy-2'-fluorouridine-3'-phosphate
  modified_base 7: mod_base = OTHER; note = 2'-O-methyluridine-3'-phosphate
  modified_base 8: mod_base = OTHER; note = 2'-O-methylcytidine-3'-phosphate
  modified_base 9: mod_base = OTHER; note = 2'-O-methyluridine-3'-phosphate
  modified_base 10: mod_base = OTHER; note = 2'-O-methylcytidine-3'-phosphate
  modified_base 11: mod_base = OTHER; note = 2'-O-methyladenosine-3'-phosphate
  modified_base 12: mod_base = OTHER; note = 2'-O-methyluridine-3'-phosphate
  modified_base 13: mod_base = OTHER; note = 2'-O-methylcytidine-3'-phosphate
  modified_base 14: mod_base = OTHER; note = 2'-deoxy-2'-fluoroadenosine-3'-phosphate
  modified_base 15: mod_base = OTHER; note = 2'-O-methylcytidine-3'-phosphate
  modified_base 16: mod_base = OTHER; note = 2'-deoxy-2'-fluorouridine-3'-phosphate
  modified_base 17: mod_base = OTHER; note = 2'-O-methylcytidine-3'-phosphate
  modified_base 18: mod_base = OTHER; note = 2'-O-methylcytidine-3'-phosphate
  modified_base 19: mod_base = OTHER; note = 2'-O-methylcytidine-3'-phosphate
  modified_base 20: mod_base = OTHER; note = 2'-O-methyluridine-3'-phosphate
  modified_base 21: mod_base = OTHER; note = 2'-O-methylcytidine-3'-phosphate
  modified_base 22: mod_base = OTHER; note = 2'-O-methyladenosine-3'-phosphate
  modified_base 23: mod_base = OTHER; note = 2'-O-methyladenosine
tttatttctcatcactccctcaa

SEQ ID NO: 5305 - RNA, 23 nt, synthetic construct
  source 1..23: mol_type = other RNA
  modified_base 1: mod_base = OTHER; note = 2'-O-methyluridine-3'-phosphate 5'phosphate
  modified_base 2: mod_base = OTHER; note = 2'-deoxy-2'-fluoroadenosine-3'-phosphate
  modified_base 3: mod_base = OTHER; note = 2'-O-methyladenosine-3'-phosphate
  modified_base 4: mod_base = OTHER; note = 2'-O-methyluridine-3'-phosphate
  modified_base 5: mod_base = OTHER; note = 2'-O-methyluridine-3'-phosphate
  modified_base 6: mod_base = OTHER; note = 2'-deoxy-2'-fluoroadenosine-3'-phosphate
  modified_base 7: mod_base = OTHER; note = 2'-O-methyluridine-3'-phosphate
  modified_base 8: mod_base = OTHER; note = 2'-O-methyluridine-3'-phosphate
  modified_base 9: mod_base = OTHER; note = 2'-O-methyluridine-3'-phosphate
  modified_base 10: mod_base = OTHER; note = 2'-O-methylcytidine-3'-phosphate
  modified_base 11: mod_base = OTHER; note = 2'-O-methyluridine-3'-phosphate
  modified_base 12: mod_base = OTHER; note = 2'-O-methylcytidine-3'-phosphate
  modified_base 13: mod_base = OTHER; note = 2'-O-methyladenosine-3'-phosphate
  modified_base 14: mod_base = OTHER; note = 2'-deoxy-2'-fluorouridine-3'-phosphate
  modified_base 15: mod_base = OTHER; note = 2'-O-methylcytidine-3'-phosphate
  modified_base 16: mod_base = OTHER; note = 2'-deoxy-2'-fluoroadenosine-3'-phosphate
  modified_base 17: mod_base = OTHER; note = 2'-O-methylcytidine-3'-phosphate
  modified_base 18: mod_base = OTHER; note = 2'-O-methyluridine-3'-phosphate
  modified_base 19: mod_base = OTHER; note = 2'-O-methylcytidine-3'-phosphate
  modified_base 20: mod_base = OTHER; note = 2'-O-methylcytidine-3'-phosphate
  modified_base 21: mod_base = OTHER; note = 2'-O-methylcytidine-3'-phosphate
  modified_base 22: mod_base = OTHER; note = 2'-O-methyluridine-3'-phosphate
  modified_base 23: mod_base = OTHER; note = 2'-O-methylcytidine
taattatttctcatcactccctc

SEQ ID NO: 5306 - RNA, 23 nt, synthetic construct
  source 1..23: mol_type = other RNA
  modified_base 1: mod_base = OTHER; note = 2'-O-methyluridine-3'-phosphate 5'phosphate
  modified_base 2: mod_base = OTHER; note = 2'-deoxy-2'-fluorouridine-3'-phosphate
  modified_base 3: mod_base = OTHER; note = 2'-O-methyluridine-3'-phosphate
  modified_base 4: mod_base = OTHER; note = 2'-O-methyladenosine-3'-phosphate
  modified_base 5: mod_base = OTHER; note = 2'-O-methyladenosine-3'-phosphate
  modified_base 6: mod_base = OTHER; note = 2'-deoxy-2'-fluorouridine-3'-phosphate
  modified_base 7: mod_base = OTHER; note = 2'-O-methyluridine-3'-phosphate
  modified_base 8: mod_base = OTHER; note = 2'-O-methyladenosine-3'-phosphate
  modified_base 9: mod_base = OTHER; note = 2'-O-methyluridine-3'-phosphate
  modified_base 10: mod_base = OTHER; note = 2'-O-methyluridine-3'-phosphate
  modified_base 11: mod_base = OTHER; note = 2'-O-methyluridine-3'-phosphate
  modified_base 12: mod_base = OTHER; note = 2'-O-methylcytidine-3'-phosphate
  modified_base 13: mod_base = OTHER; note = 2'-O-methyluridine-3'-phosphate
  modified_base 14: mod_base = OTHER; note = 2'-deoxy-2'-fluorocytidine-3'-phosphate
  modified_base 15: mod_base = OTHER; note = 2'-O-methyladenosine-3'-phosphate
  modified_base 16: mod_base = OTHER; note = 2'-deoxy-2'-fluorouridine-3'-phosphate
  modified_base 17: mod_base = OTHER; note = 2'-O-methylcytidine-3'-phosphate
  modified_base 18: mod_base = OTHER; note = 2'-O-methyladenosine-3'-phosphate
  modified_base 19: mod_base = OTHER; note = 2'-O-methylcytidine-3'-phosphate
  modified_base 20: mod_base = OTHER; note = 2'-O-methyluridine-3'-phosphate
  modified_base 21: mod_base = OTHER; note = 2'-O-methylcytidine-3'-phosphate
  modified_base 22: mod_base = OTHER; note = 2'-O-methylcytidine-3'-phosphate
  modified_base 23: mod_base = OTHER; note = 2'-O-methylcytidine
tttaattatttctcatcactccc

SEQ ID NO: 5307 - RNA, 23 nt, synthetic construct
  source 1..23: mol_type = other RNA
  modified_base 1: mod_base = OTHER; note = 2'-O-methyluridine-3'-phosphate 5'phosphate
  modified_base 2: mod_base = OTHER; note = 2'-deoxy-2'-fluoroadenosine-3'-phosphate
  modified_base 3: mod_base = OTHER; note = 2'-O-methyluridine-3'-phosphate
  modified_base 4: mod_base = OTHER; note = 2'-O-methyluridine-3'-phosphate
  modified_base 5: mod_base = OTHER; note = 2'-O-methyladenosine-3'-phosphate
  modified_base 6: mod_base = OTHER; note = 2'-deoxy-2'-fluoroadenosine-3'-phosphate
  modified_base 7: mod_base = OTHER; note = 2'-O-methyluridine-3'-phosphate
  modified_base 8: mod_base = OTHER; note = 2'-O-methyluridine-3'-phosphate
  modified_base 9: mod_base = OTHER; note = 2'-O-methyladenosine-3'-phosphate
  modified_base 10: mod_base = OTHER; note = 2'-O-methyluridine-3'-phosphate
  modified_base 11: mod_base = OTHER; note = 2'-O-methyluridine-3'-phosphate
  modified_base 12: mod_base = OTHER; note = 2'-O-methyluridine-3'-phosphate
  modified_base 13: mod_base = OTHER; note = 2'-O-methylcytidine-3'-phosphate
  modified_base 14: mod_base = OTHER; note = 2'-deoxy-2'-fluorouridine-3'-phosphate
  modified_base 15: mod_base = OTHER; note = 2'-O-methylcytidine-3'-phosphate
  modified_base 16: mod_base = OTHER; note = 2'-deoxy-2'-fluoroadenosine-3'-phosphate
  modified_base 17: mod_base = OTHER; note = 2'-O-methyluridine-3'-phosphate
  modified_base 18: mod_base = OTHER; note = 2'-O-methylcytidine-3'-phosphate
  modified_base 19: mod_base = OTHER; note = 2'-O-methyladenosine-3'-phosphate
  modified_base 20: mod_base = OTHER; note = 2'-O-methylcytidine-3'-phosphate
  modified_base 21: mod_base = OTHER; note = 2'-O-methyluridine-3'-phosphate
  modified_base 22: mod_base = OTHER; note = 2'-O-methylcytidine-3'-phosphate
  modified_base 23: mod_base = OTHER; note = 2'-O-methylcytidine
tattaattatttctcatcactcc

SEQ ID NO: 5308 - RNA, 23 nt, synthetic construct
  source 1..23: mol_type = other RNA
  modified_base 1: mod_base = OTHER; note = 2'-O-methyluridine-3'-phosphate 5'phosphate
  modified_base 2: mod_base = OTHER; note = 2'-deoxy-2'-fluoroadenosine-3'-phosphate
  modified_base 3: mod_base = OTHER; note = 2'-O-methyladenosine-3'-phosphate
  modified_base 4: mod_base = OTHER; note = 2'-O-methyluridine-3'-phosphate
  modified_base 5: mod_base = OTHER; note = 2'-O-methyluridine-3'-phosphate
  modified_base 6: mod_base = OTHER; note = 2'-deoxy-2'-fluoroadenosine-3'-phosphate
  modified_base 7: mod_base = OTHER; note = 2'-O-methyladenosine-3'-phosphate
  modified_base 8: mod_base = OTHER; note = 2'-O-methyluridine-3'-phosphate
  modified_base 9: mod_base = OTHER; note = 2'-O-methyluridine-3'-phosphate
  modified_base 10: mod_base = OTHER; note = 2'-O-methyladenosine-3'-phosphate
  modified_base 11: mod_base = OTHER; note = 2'-O-methyluridine-3'-phosphate
  modified_base 12: mod_base = OTHER; note = 2'-O-methyluridine-3'-phosphate
  modified_base 13: mod_base = OTHER; note = 2'-O-methyluridine-3'-phosphate
  modified_base 14: mod_base = OTHER; note = 2'-deoxy-2'-fluorocytidine-3'-phosphate
  modified_base 15: mod_base = OTHER; note = 2'-O-methyluridine-3'-phosphate
  modified_base 16: mod_base = OTHER; note = 2'-deoxy-2'-fluorocytidine-3'-phosphate
  modified_base 17: mod_base = OTHER; note = 2'-O-methyladenosine-3'-phosphate
  modified_base 18: mod_base = OTHER; note = 2'-O-methyluridine-3'-phosphate
  modified_base 19: mod_base = OTHER; note = 2'-O-methylcytidine-3'-phosphate
  modified_base 20: mod_base = OTHER; note = 2'-O-methyladenosine-3'-phosphate
  modified_base 21: mod_base = OTHER; note = 2'-O-methylcytidine-3'-phosphate
  modified_base 22: mod_base = OTHER; note = 2'-O-methyluridine-3'-phosphate
  modified_base 23: mod_base = OTHER; note = 2'-O-methylcytidine
taattaattatttctcatcactc

SEQ ID NO: 5309 - RNA, 23 nt, synthetic construct
  source 1..23: mol_type = other RNA
  modified_base 1: mod_base = OTHER; note = 2'-O-methyluridine-3'-phosphate 5'phosphate
  modified_base 2: mod_base = OTHER; note = 2'-deoxy-2'-fluorocytidine-3'-phosphate
  modified_base 3: mod_base = OTHER; note = 2'-O-methyladenosine-3'-phosphate
  modified_base 4: mod_base = OTHER; note = 2'-O-methyladenosine-3'-phosphate
  modified_base 5: mod_base = OTHER; note = 2'-O-methyluridine-3'-phosphate
  modified_base 6: mod_base = OTHER; note = 2'-deoxy-2'-fluorouridine-3'-phosphate
  modified_base 7: mod_base = OTHER; note = 2'-O-methyladenosine-3'-phosphate
  modified_base 8: mod_base = OTHER; note = 2'-O-methyladenosine-3'-phosphate
  modified_base 9: mod_base = OTHER; note = 2'-O-methyluridine-3'-phosphate
  modified_base 10: mod_base = OTHER; note = 2'-O-methyluridine-3'-phosphate
  modified_base 11: mod_base = OTHER; note = 2'-O-methyladenosine-3'-phosphate
  modified_base 12: mod_base = OTHER; note = 2'-O-methyluridine-3'-phosphate
  modified_base 13: mod_base = OTHER; note = 2'-O-methyluridine-3'-phosphate
  modified_base 14: mod_base = OTHER; note = 2'-deoxy-2'-fluorouridine-3'-phosphate
  modified_base 15: mod_base = OTHER; note = 2'-O-methylcytidine-3'-phosphate
  modified_base 16: mod_base = OTHER; note = 2'-deoxy-2'-fluorouridine-3'-phosphate
  modified_base 17: mod_base = OTHER; note = 2'-O-methylcytidine-3'-phosphate
  modified_base 18: mod_base = OTHER; note = 2'-O-methyladenosine-3'-phosphate
  modified_base 19: mod_base = OTHER; note = 2'-O-methyluridine-3'-phosphate
  modified_base 20: mod_base = OTHER; note = 2'-O-methylcytidine-3'-phosphate
  modified_base 21: mod_base = OTHER; note = 2'-O-methyladenosine-3'-phosphate
  modified_base 22: mod_base = OTHER; note = 2'-O-methylcytidine-3'-phosphate
  modified_base 23: mod_base = OTHER; note = 2'-O-methyluridine
tcaattaattatttctcatcact

SEQ ID NO: 5310 - RNA, 23 nt, synthetic construct
  source 1..23: mol_type = other RNA
  modified_base 1: mod_base = OTHER; note = 2'-O-methyluridine-3'-phosphate 5'phosphate
  modified_base 2: mod_base = OTHER; note = 2'-deoxy-2'-fluorocytidine-3'-phosphate
  modified_base 3: mod_base = OTHER; note = 2'-O-methylcytidine-3'-phosphate
  modified_base 4: mod_base = OTHER; note = 2'-O-methyladenosine-3'-phosphate
  modified_base 5: mod_base = OTHER; note = 2'-O-methyladenosine-3'-phosphate
  modified_base 6: mod_base = OTHER; note = 2'-deoxy-2'-fluorouridine-3'-phosphate
  modified_base 7: mod_base = OTHER; note = 2'-O-methyluridine-3'-phosphate
  modified_base 8: mod_base = OTHER; note = 2'-O-methyladenosine-3'-phosphate
  modified_base 9: mod_base = OTHER; note = 2'-O-methyladenosine-3'-phosphate
  modified_base 10: mod_base = OTHER; note = 2'-O-methyluridine-3'-phosphate
  modified_base 11: mod_base = OTHER; note = 2'-O-methyluridine-3'-phosphate
  modified_base 12: mod_base = OTHER; note = 2'-O-methyladenosine-3'-phosphate
  modified_base 13: mod_base = OTHER; note = 2'-O-methyluridine-3'-phosphate
  modified_base 14: mod_base = OTHER; note = 2'-deoxy-2'-fluorouridine-3'-phosphate
  modified_base 15: mod_base = OTHER; note = 2'-O-methyluridine-3'-phosphate
  modified_base 16: mod_base = OTHER; note = 2'-deoxy-2'-fluorocytidine-3'-phosphate
  modified_base 17: mod_base = OTHER; note = 2'-O-methyluridine-3'-phosphate
  modified_base 18: mod_base = OTHER; note = 2'-O-methylcytidine-3'-phosphate
  modified_base 19: mod_base = OTHER; note = 2'-O-methyladenosine-3'-phosphate
  modified_base 20: mod_base = OTHER; note = 2'-O-methyluridine-3'-phosphate
  modified_base 21: mod_base = OTHER; note = 2'-O-methylcytidine-3'-phosphate
  modified_base 22: mod_base = OTHER; note = 2'-O-methyladenosine-3'-phosphate
  modified_base 23: mod_base = OTHER; note = 2'-O-methylcytidine
tccaattaattatttctcatcac

SEQ ID NO: 5311 - RNA, 23 nt, synthetic construct
  source 1..23: mol_type = other RNA
  modified_base 1: mod_base = OTHER; note = 2'-O-methyluridine-3'-phosphate 5'phosphate
  modified_base 2: mod_base = OTHER; note = 2'-deoxy-2'-fluorouridine-3'-phosphate
  modified_base 3: mod_base = OTHER; note = 2'-O-methylcytidine-3'-phosphate
  modified_base 4: mod_base = OTHER; note = 2'-O-methylcytidine-3'-phosphate
  modified_base 5: mod_base = OTHER; note = 2'-O-methyladenosine-3'-phosphate
  modified_base 6: mod_base = OTHER; note = 2'-deoxy-2'-fluoroadenosine-3'-phosphate
  modified_base 7: mod_base = OTHER; note = 2'-O-methyluridine-3'-phosphate
  modified_base 8: mod_base = OTHER; note = 2'-O-methyluridine-3'-phosphate
  modified_base 9: mod_base = OTHER; note = 2'-O-methyladenosine-3'-phosphate
  modified_base 10: mod_base = OTHER; note = 2'-O-methyladenosine-3'-phosphate
  modified_base 11: mod_base = OTHER; note = 2'-O-methyluridine-3'-phosphate
  modified_base 12: mod_base = OTHER; note = 2'-O-methyluridine-3'-phosphate
  modified_base 13: mod_base = OTHER; note = 2'-O-methyladenosine-3'-phosphate
  modified_base 14: mod_base = OTHER; note = 2'-deoxy-2'-fluorouridine-3'-phosphate
  modified_base 15: mod_base = OTHER; note = 2'-O-methyluridine-3'-phosphate
  modified_base 16: mod_base = OTHER; note = 2'-deoxy-2'-fluorouridine-3'-phosphate
  modified_base 17: mod_base = OTHER; note = 2'-O-methylcytidine-3'-phosphate
  modified_base 18: mod_base = OTHER; note = 2'-O-methyluridine-3'-phosphate
  modified_base 19: mod_base = OTHER; note = 2'-O-methylcytidine-3'-phosphate
  modified_base 20: mod_base = OTHER; note = 2'-O-methyladenosine-3'-phosphate
  modified_base 21: mod_base = OTHER; note = 2'-O-methyluridine-3'-phosphate
  modified_base 22: mod_base = OTHER; note = 2'-O-methylcytidine-3'-phosphate
  modified_base 23: mod_base = OTHER; note = 2'-O-methyladenosine
ttccaattaattatttctcatca

SEQ ID NO: 5312 - RNA, 23 nt, synthetic construct
  source 1..23: mol_type = other RNA
  modified_base 1: mod_base = OTHER; note = 2'-O-methyluridine-3'-phosphate 5'phosphate
  modified_base 2: mod_base = OTHER; note = 2'-deoxy-2'-fluoroguanosine-3'-phosphate
  modified_base 3: mod_base = OTHER; note = 2'-O-methyluridine-3'-phosphate
  modified_base 4: mod_base = OTHER; note = 2'-O-methylcytidine-3'-phosphate
  modified_base 5: mod_base = OTHER; note = 2'-O-methyladenosine-3'-phosphate
  modified_base 6: mod_base = OTHER; note = 2'-deoxy-2'-fluorocytidine-3'-phosphate
  modified_base 7: mod_base = OTHER; note = 2'-O-methyluridine-3'-phosphate
  modified_base 8: mod_base = OTHER; note = 2'-O-methylcytidine-3'-phosphate
  modified_base 9: mod_base = OTHER; note = 2'-O-methyluridine-3'-phosphate
  modified_base 10: mod_base = OTHER; note = 2'-O-methylguanosine-3'-phosphate
  modified_base 11: mod_base = OTHER; note = 2'-O-methyluridine-3'-phosphate
  modified_base 12: mod_base = OTHER; note = 2'-O-methylcytidine-3'-phosphate
  modified_base 13: mod_base = OTHER; note = 2'-O-methyluridine-3'-phosphate
  modified_base 14: mod_base = OTHER; note = 2'-deoxy-2'-fluorocytidine-3'-phosphate
  modified_base 15: mod_base = OTHER; note = 2'-O-methylcytidine-3'-phosphate
  modified_base 16: mod_base = OTHER; note = 2'-deoxy-2'-fluorocytidine-3'-phosphate
  modified_base 17: mod_base = OTHER; note = 2'-O-methylguanosine-3'-phosphate
  modified_base 18: mod_base = OTHER; note = 2'-O-methyluridine-3'-phosphate
  modified_base 19: mod_base = OTHER; note = 2'-O-methylcytidine-3'-phosphate
  modified_base 20: mod_base = OTHER; note = 2'-O-methylcytidine-3'-phosphate
  modified_base 21: mod_base = OTHER; note = 2'-O-methyladenosine-3'-phosphate
  modified_base 22: mod_base = OTHER; note = 2'-O-methyladenosine-3'-phosphate
  modified_base 23: mod_base = OTHER; note = 2'-O-methyluridine
tgtcactctgtctcccgtccaat

SEQ ID NO: 5313 - RNA, 23 nt, synthetic construct
  source 1..23: mol_type = other RNA
  modified_base 1: mod_base = OTHER; note = 2'-O-methyluridine-3'-phosphate 5'phosphate
  modified_base 2: mod_base = OTHER; note = 2'-deoxy-2'-fluorocytidine-3'-phosphate
  modified_base 3: mod_base = OTHER; note = 2'-O-methylguanosine-3'-phosphate
  modified_base 4: mod_base = OTHER; note = 2'-O-methyluridine-3'-phosphate
  modified_base 5: mod_base = OTHER; note = 2'-O-methylcytidine-3'-phosphate
  modified_base 6: mod_base = OTHER; note = 2'-deoxy-2'-fluoroadenosine-3'-phosphate
  modified_base 7: mod_base = OTHER; note = 2'-O-methylcytidine-3'-phosphate
  modified_base 8: mod_base = OTHER; note = 2'-O-methyluridine-3'-phosphate
  modified_base 9: mod_base = OTHER; note = 2'-O-methylcytidine-3'-phosphate
  modified_base 10: mod_base = OTHER; note = 2'-O-methyluridine-3'-phosphate
  modified_base 11: mod_base = OTHER; note = 2'-O-methylguanosine-3'-phosphate
  modified_base 12: mod_base = OTHER; note = 2'-O-methyluridine-3'-phosphate
  modified_base 13: mod_base = OTHER; note = 2'-O-methylcytidine-3'-phosphate
  modified_base 14: mod_base = OTHER; note = 2'-deoxy-2'-fluorouridine-3'-phosphate
  modified_base 15: mod_base = OTHER; note = 2'-O-methylcytidine-3'-phosphate
  modified_base 16: mod_base = OTHER; note = 2'-deoxy-2'-fluorocytidine-3'-phosphate
  modified_base 17: mod_base = OTHER; note = 2'-O-methylcytidine-3'-phosphate
  modified_base 18: mod_base = OTHER; note = 2'-O-methylguanosine-3'-phosphate
  modified_base 19: mod_base = OTHER; note = 2'-O-methyluridine-3'-phosphate
  modified_base 20: mod_base = OTHER; note = 2'-O-methylcytidine-3'-phosphate
  modified_base 21: mod_base = OTHER; note = 2'-O-methylcytidine-3'-phosphate
  modified_base 22: mod_base = OTHER; note = 2'-O-methyladenosine-3'-phosphate
  modified_base 23: mod_base = OTHER; note = 2'-O-methyladenosine
tcgtcactctgtctcccgtccaa

SEQ ID NO: 5314 - RNA, 23 nt, synthetic construct
  source 1..23: mol_type = other RNA
  modified_base 1: mod_base = OTHER; note = 2'-O-methyluridine-3'-phosphate 5'phosphate
  modified_base 2: mod_base = OTHER; note = 2'-deoxy-2'-fluoroguanosine-3'-phosphate
  modified_base 3: mod_base = OTHER; note = 2'-O-methylcytidine-3'-phosphate
  modified_base 4: mod_base = OTHER; note = 2'-O-methylguanosine-3'-phosphate
  modified_base 5: mod_base = OTHER; note = 2'-O-methyluridine-3'-phosphate
  modified_base 6: mod_base = OTHER; note = 2'-deoxy-2'-fluorocytidine-3'-phosphate
  modified_base 7: mod_base = OTHER; note = 2'-O-methyladenosine-3'-phosphate
  modified_base 8: mod_base = OTHER; note = 2'-O-methylcytidine-3'-phosphate
  modified_base 9: mod_base = OTHER; note = 2'-O-methyluridine-3'-phosphate
  modified_base 10: mod_base = OTHER; note = 2'-O-methylcytidine-3'-phosphate
  modified_base 11: mod_base = OTHER; note = 2'-O-methyluridine-3'-phosphate
  modified_base 12: mod_base = OTHER; note = 2'-O-methylguanosine-3'-phosphate
  modified_base 13: mod_base = OTHER; note = 2'-O-methyluridine-3'-phosphate
  modified_base 14: mod_base = OTHER; note = 2'-deoxy-2'-fluorocytidine-3'-phosphate
  modified_base 15: mod_base = OTHER; note = 2'-O-methyluridine-3'-phosphate
  modified_base 16: mod_base = OTHER; note = 2'-deoxy-2'-fluorocytidine-3'-phosphate
  modified_base 17: mod_base = OTHER; note = 2'-O-methylcytidine-3'-phosphate
  modified_base 18: mod_base = OTHER; note = 2'-O-methylcytidine-3'-phosphate
  modified_base 19: mod_base = OTHER; note = 2'-O-methylguanosine-3'-phosphate
  modified_base 20: mod_base = OTHER; note = 2'-O-methyluridine-3'-phosphate
  modified_base 21: mod_base = OTHER; note = 2'-O-methylcytidine-3'-phosphate
  modified_base 22: mod_base = OTHER; note = 2'-O-methylcytidine-3'-phosphate
  modified_base 23: mod_base = OTHER; note = 2'-O-methyladenosine
tgcgtcactctgtctcccgtcca

SEQ ID NO: 5315 - RNA, 23 nt, synthetic construct
  source 1..23: mol_type = other RNA
  modified_base 1: mod_base = OTHER; note = 2'-O-methyluridine-3'-phosphate 5'phosphate
  modified_base 2: mod_base = OTHER; note = 2'-deoxy-2'-fluorouridine-3'-phosphate
  modified_base 3: mod_base = OTHER; note = 2'-O-methylguanosine-3'-phosphate
  modified_base 4: mod_base = OTHER; note = 2'-O-methylcytidine-3'-phosphate
  modified_base 5: mod_base = OTHER; note = 2'-O-methylguanosine-3'-phosphate
  modified_base 6: mod_base = OTHER; note = 2'-deoxy-2'-fluorouridine-3'-phosphate
  modified_base 7: mod_base = OTHER; note = 2'-O-methylcytidine-3'-phosphate
  modified_base 8: mod_base = OTHER; note = 2'-O-methyladenosine-3'-phosphate
  modified_base 9: mod_base = OTHER; note = 2'-O-methylcytidine-3'-phosphate
  modified_base 10: mod_base = OTHER; note = 2'-O-methyluridine-3'-phosphate
  modified_base 11: mod_base = OTHER; note = 2'-O-methylcytidine-3'-phosphate
  modified_base 12: mod_base = OTHER; note = 2'-O-methyluridine-3'-phosphate
  modified_base 13: mod_base = OTHER; note = 2'-O-methylguanosine-3'-phosphate
  modified_base 14: mod_base = OTHER; note = 2'-deoxy-2'-fluorouridine-3'-phosphate
  modified_base 15: mod_base = OTHER; note = 2'-O-methylcytidine-3'-phosphate
  modified_base 16: mod_base = OTHER; note = 2'-deoxy-2'-fluorouridine-3'-phosphate
  modified_base 17: mod_base = OTHER; note = 2'-O-methylcytidine-3'-phosphate
  modified_base 18: mod_base = OTHER; note = 2'-O-methylcytidine-3'-phosphate
  modified_base 19: mod_base = OTHER; note = 2'-O-methylcytidine-3'-phosphate
  modified_base 20: mod_base = OTHER; note = 2'-O-methylguanosine-3'-phosphate
  modified_base 21: mod_base = OTHER; note = 2'-O-methyluridine-3'-phosphate
  modified_base 22: mod_base = OTHER; note = 2'-O-methylcytidine-3'-phosphate
  modified_base 23: mod_base = OTHER; note = 2'-O-methylcytidine
ttgcgtcactctgtctcccgtcc

SEQ ID NO: 5316 - RNA, 23 nt, synthetic construct
  source 1..23: mol_type = other RNA
  modified_base 1: mod_base = OTHER; note = 2'-O-methyluridine-3'-phosphate 5'phosphate
  modified_base 2: mod_base = OTHER; note = 2'-deoxy-2'-fluoroguanosine-3'-phosphate
  modified_base 3: mod_base = OTHER; note = 2'-O-methyluridine-3'-phosphate
  modified_base 4: mod_base = OTHER; note = 2'-O-methylcytidine-3'-phosphate
  modified_base 5: mod_base = OTHER; note = 2'-O-methyladenosine-3'-phosphate
  modified_base 6: mod_base = OTHER; note = 2'-deoxy-2'-fluoroguanosine-3'-phosphate
  modified_base 7: mod_base = OTHER; note = 2'-O-methyluridine-3'-phosphate
  modified_base 8: mod_base = OTHER; note = 2'-O-methylguanosine-3'-phosphate
  modified_base 9: mod_base = OTHER; note = 2'-O-methylcytidine-3'-phosphate
  modified_base 10: mod_base = OTHER; note = 2'-O-methylguanosine-3'-phosphate
  modified_base 11: mod_base = OTHER; note = 2'-O-methyluridine-3'-phosphate
  modified_base 12: mod_base = OTHER; note = 2'-O-methylcytidine-3'-phosphate
  modified_base 13: mod_base = OTHER; note = 2'-O-methyladenosine-3'-phosphate
  modified_base 14: mod_base = OTHER; note = 2'-deoxy-2'-fluorocytidine-3'-phosphate
  modified_base 15: mod_base = OTHER; note = 2'-O-methyluridine-3'-phosphate
  modified_base 16: mod_base = OTHER; note = 2'-deoxy-2'-fluorocytidine-3'-phosphate
  modified_base 17: mod_base = OTHER; note = 2'-O-methyluridine-3'-phosphate
  modified_base 18: mod_base = OTHER; note = 2'-O-methylguanosine-3'-phosphate
  modified_base 19: mod_base = OTHER; note = 2'-O-methyluridine-3'-phosphate
  modified_base 20: mod_base = OTHER; note = 2'-O-methylcytidine-3'-phosphate
  modified_base 21: mod_base = OTHER; note = 2'-O-methyluridine-3'-phosphate
  modified_base 22: mod_base = OTHER; note = 2'-O-methylcytidine-3'-phosphate
  modified_base 23: mod_base = OTHER; note = 2'-O-methylcytidine
tgtcagtgcgtcactctgtctcc

SEQ ID NO: 5317 - RNA, 23 nt, synthetic construct
  source 1..23: mol_type = other RNA
  modified_base 1: mod_base = OTHER; note = 2'-O-methyluridine-3'-phosphate 5'phosphate
  modified_base 2: mod_base = OTHER; note = 2'-deoxy-2'-fluoroguanosine-3'-phosphate
  modified_base 3: mod_base = OTHER; note = 2'-O-methyladenosine-3'-phosphate
  modified_base 4: mod_base = OTHER; note = 2'-O-methylguanosine-3'-phosphate
  modified_base 5: mod_base = OTHER; note = 2'-O-methyluridine-3'-phosphate
  modified_base 6: mod_base = OTHER; note = 2'-deoxy-2'-fluorocytidine-3'-phosphate
  modified_base 7: mod_base = OTHER; note = 2'-O-methyladenosine-3'-phosphate
  modified_base 8: mod_base = OTHER; note = 2'-O-methylguanosine-3'-phosphate
  modified_base 9: mod_base = OTHER; note = 2'-O-methyluridine-3'-phosphate
  modified_base 10: mod_base = OTHER; note = 2'-O-methylguanosine-3'-phosphate
  modified_base 11: mod_base = OTHER; note = 2'-O-methylcytidine-3'-phosphate
  modified_base 12: mod_base = OTHER; note = 2'-O-methylguanosine-3'-phosphate
  modified_base 13: mod_base = OTHER; note = 2'-O-methyluridine-3'-phosphate
  modified_base 14: mod_base = OTHER; note = 2'-deoxy-2'-fluorocytidine-3'-phosphate
  modified_base 15: mod_base = OTHER; note = 2'-O-methyladenosine-3'-phosphate
  modified_base 16: mod_base = OTHER; note = 2'-deoxy-2'-fluorocytidine-3'-phosphate
  modified_base 17: mod_base = OTHER; note = 2'-O-methyluridine-3'-phosphate
  modified_base 18: mod_base = OTHER; note = 2'-O-methylcytidine-3'-phosphate
  modified_base 19: mod_base = OTHER; note = 2'-O-methyluridine-3'-phosphate
  modified_base 20: mod_base = OTHER; note = 2'-O-methylguanosine-3'-phosphate
  modified_base 21: mod_base = OTHER; note = 2'-O-methyluridine-3'-phosphate
  modified_base 22: mod_base = OTHER; note = 2'-O-methylcytidine-3'-phosphate
  modified_base 23: mod_base = OTHER; note = 2'-O-methyluridine
tgagtcagtgcgtcactctgtct

SEQ ID NO: 5318 - RNA, 23 nt, synthetic construct
  source 1..23: mol_type = other RNA
  modified_base 1: mod_base = OTHER; note = 2'-O-methyluridine-3'-phosphate 5'phosphate
  modified_base 2: mod_base = OTHER; note = 2'-deoxy-2'-fluoroguanosine-3'-phosphate
  modified_base 3: mod_base = OTHER; note = 2'-O-methyluridine-3'-phosphate
  modified_base 4: mod_base = OTHER; note = 2'-O-methylguanosine-3'-phosphate
  modified_base 5: mod_base = OTHER; note = 2'-O-methyladenosine-3'-phosphate
  modified_base 6: mod_base = OTHER; note = 2'-deoxy-2'-fluoroguanosine-3'-phosphate
  modified_base 7: mod_base = OTHER; note = 2'-O-methyluridine-3'-phosphate
  modified_base 8: mod_base = OTHER; note = 2'-O-methylcytidine-3'-phosphate
  modified_base 9: mod_base = OTHER; note = 2'-O-methyladenosine-3'-phosphate
  modified_base 10: mod_base = OTHER; note = 2'-O-methylguanosine-3'-phosphate
  modified_base 11: mod_base = OTHER; note = 2'-O-methyluridine-3'-phosphate
  modified_base 12: mod_base = OTHER; note = 2'-O-methylguanosine-3'-phosphate
  modified_base 13: mod_base = OTHER; note = 2'-O-methylcytidine-3'-phosphate
  modified_base 14: mod_base = OTHER; note = 2'-deoxy-2'-fluoroguanosine-3'-phosphate
  modified_base 15: mod_base = OTHER; note = 2'-O-methyluridine-3'-phosphate
  modified_base 16: mod_base = OTHER; note = 2'-deoxy-2'-fluorocytidine-3'-phosphate
  modified_base 17: mod_base = OTHER; note = 2'-O-methyladenosine-3'-phosphate
  modified_base 18: mod_base = OTHER; note = 2'-O-methylcytidine-3'-phosphate
  modified_base 19: mod_base = OTHER; note = 2'-O-methyluridine-3'-phosphate
  modified_base 20: mod_base = OTHER; note = 2'-O-methylcytidine-3'-phosphate
  modified_base 21: mod_base = OTHER; note = 2'-O-methyluridine-3'-phosphate
  modified_base 22: mod_base = OTHER; note = 2'-O-methylguanosine-3'-phosphate
  modified_base 23: mod_base = OTHER; note = 2'-O-methyluridine
tgtgagtcagtgcgtcactctgt

SEQ ID NO: 5319 - RNA, 23 nt, synthetic construct
  source 1..23: mol_type = other RNA
  modified_base 1: mod_base = OTHER; note = 2'-O-methyluridine-3'-phosphate 5'phosphate
  modified_base 2: mod_base = OTHER; note = 2'-deoxy-2'-fluoroguanosine-3'-phosphate
  modified_base 3: mod_base = OTHER; note = 2'-O-methylguanosine-3'-phosphate
  modified_base 4: mod_base = OTHER; note = 2'-O-methyluridine-3'-phosphate
  modified_base 5: mod_base = OTHER; note = 2'-O-methylguanosine-3'-phosphate
  modified_base 6: mod_base = OTHER; note = 2'-deoxy-2'-fluoroadenosine-3'-phosphate
  modified_base 7: mod_base = OTHER; note = 2'-O-methylguanosine-3'-phosphate
  modified_base 8: mod_base = OTHER; note = 2'-O-methyluridine-3'-phosphate
  modified_base 9: mod_base = OTHER; note = 2'-O-methylcytidine-3'-phosphate
  modified_base 10: mod_base = OTHER; note = 2'-O-methyladenosine-3'-phosphate
  modified_base 11: mod_base = OTHER; note = 2'-O-methylguanosine-3'-phosphate
  modified_base 12: mod_base = OTHER; note = 2'-O-methyluridine-3'-phosphate
  modified_base 13: mod_base = OTHER; note = 2'-O-methylguanosine-3'-phosphate
  modified_base 14: mod_base = OTHER; note = 2'-deoxy-2'-fluorocytidine-3'-phosphate
  modified_base 15: mod_base = OTHER; note = 2'-O-methylguanosine-3'-phosphate
  modified_base 16: mod_base = OTHER; note = 2'-deoxy-2'-fluorouridine-3'-phosphate
  modified_base 17: mod_base = OTHER; note = 2'-O-methylcytidine-3'-phosphate
  modified_base 18: mod_base = OTHER; note = 2'-O-methyladenosine-3'-phosphate
  modified_base 19: mod_base = OTHER; note = 2'-O-methylcytidine-3'-phosphate
  modified_base 20: mod_base = OTHER; note = 2'-O-methyluridine-3'-phosphate
  modified_base 21: mod_base = OTHER; note = 2'-O-methylcytidine-3'-phosphate
  modified_base 22: mod_base = OTHER; note = 2'-O-methyluridine-3'-phosphate
  modified_base 23: mod_base = OTHER; note = 2'-O-methylguanosine
tggtgagtcagtgcgtcactctg

SEQ ID NO: 5320 - RNA, 23 nt, synthetic construct
  source 1..23: mol_type = other RNA
  modified_base 1: mod_base = OTHER; note = 2'-O-methyluridine-3'-phosphate 5'phosphate
  modified_base 2: mod_base = OTHER; note = 2'-deoxy-2'-fluoroadenosine-3'-phosphate
  modified_base 3: mod_base = OTHER; note = 2'-O-methylguanosine-3'-phosphate
  modified_base 4: mod_base = OTHER; note = 2'-O-methylguanosine-3'-phosphate
  modified_base 5: mod_base = OTHER; note = 2'-O-methyluridine-3'-phosphate
  modified_base 6: mod_base = OTHER; note = 2'-deoxy-2'-fluoroguanosine-3'-phosphate
  modified_base 7: mod_base = OTHER; note = 2'-O-methyladenosine-3'-phosphate
  modified_base 8: mod_base = OTHER; note = 2'-O-methylguanosine-3'-phosphate
  modified_base 9: mod_base = OTHER; note = 2'-O-methyluridine-3'-phosphate
  modified_base 10: mod_base = OTHER; note = 2'-O-methylcytidine-3'-phosphate
  modified_base 11: mod_base = OTHER; note = 2'-O-methyladenosine-3'-phosphate
  modified_base 12: mod_base = OTHER; note = 2'-O-methylguanosine-3'-phosphate
  modified_base 13: mod_base = OTHER; note = 2'-O-methyluridine-3'-phosphate
  modified_base 14: mod_base = OTHER; note = 2'-deoxy-2'-fluoroguanosine-3'-phosphate
  modified_base 15: mod_base = OTHER; note = 2'-O-methylcytidine-3'-phosphate
  modified_base 16: mod_base = OTHER; note = 2'-deoxy-2'-fluoroguanosine-3'-phosphate
  modified_base 17: mod_base = OTHER; note = 2'-O-methyluridine-3'-phosphate
  modified_base 18: mod_base = OTHER; note = 2'-O-methylcytidine-3'-phosphate
  modified_base 19: mod_base = OTHER; note = 2'-O-methyladenosine-3'-phosphate
  modified_base 20: mod_base = OTHER; note = 2'-O-methylcytidine-3'-phosphate
  modified_base 21: mod_base = OTHER; note = 2'-O-methyluridine-3'-phosphate
  modified_base 22: mod_base = OTHER; note = 2'-O-methylcytidine-3'-phosphate
  modified_base 23: mod_base = OTHER; note = 2'-O-methyluridine
taggtgagtcagtgcgtcactct

SEQ ID NO: 5321 - RNA, 23 nt, synthetic construct
  source 1..23: mol_type = other RNA
  modified_base 1: mod_base = OTHER; note = 2'-O-methyluridine-3'-phosphate 5'phosphate
  modified_base 2: mod_base = OTHER; note = 2'-deoxy-2'-fluorocytidine-3'-phosphate
  modified_base 3: mod_base = OTHER; note = 2'-O-methyluridine-3'-phosphate
  modified_base 4: mod_base = OTHER; note = 2'-O-methyladenosine-3'-phosphate
  modified_base 5: mod_base = OTHER; note = 2'-O-methylguanosine-3'-phosphate
  modified_base 6: mod_base = OTHER; note = 2'-deoxy-2'-fluoroguanosine-3'-phosphate
  modified_base 7: mod_base = OTHER; note = 2'-O-methyluridine-3'-phosphate
  modified_base 8: mod_base = OTHER; note = 2'-O-methylguanosine-3'-phosphate
  modified_base 9: mod_base = OTHER; note = 2'-O-methyladenosine-3'-phosphate
  modified_base 10: mod_base = OTHER; note = 2'-O-methylguanosine-3'-phosphate
  modified_base 11: mod_base = OTHER; note = 2'-O-methyluridine-3'-phosphate
  modified_base 12: mod_base = OTHER; note = 2'-O-methylcytidine-3'-phosphate
  modified_base 13: mod_base = OTHER; note = 2'-O-methyladenosine-3'-phosphate
  modified_base 14: mod_base = OTHER; note = 2'-deoxy-2'-fluoroguanosine-3'-phosphate
  modified_base 15: mod_base = OTHER; note = 2'-O-methyluridine-3'-phosphate
  modified_base 16: mod_base = OTHER; note = 2'-deoxy-2'-fluoroguanosine-3'-phosphate
  modified_base 17: mod_base = OTHER; note = 2'-O-methylcytidine-3'-phosphate
  modified_base 18: mod_base = OTHER; note = 2'-O-methylguanosine-3'-phosphate
  modified_base 19: mod_base = OTHER; note = 2'-O-methyluridine-3'-phosphate
  modified_base 20: mod_base = OTHER; note = 2'-O-methylcytidine-3'-phosphate
  modified_base 21: mod_base = OTHER; note = 2'-O-methyladenosine-3'-phosphate
  modified_base 22: mod_base = OTHER; note = 2'-O-methylcytidine-3'-phosphate
  modified_base 23: mod_base = OTHER; note = 2'-O-methyluridine
tctaggtgagtcagtgcgtcact

SEQ ID NO: 5322 - RNA, 23 nt, synthetic construct
  source 1..23: mol_type = other RNA
  modified_base 1: mod_base = OTHER; note = 2'-O-methyluridine-3'-phosphate 5'phosphate
  modified_base 2: mod_base = OTHER; note = 2'-deoxy-2'-fluorouridine-3'-phosphate
  modified_base 3: mod_base = OTHER; note = 2'-O-methylcytidine-3'-phosphate
  modified_base 4: mod_base = OTHER; note = 2'-O-methyluridine-3'-phosphate
  modified_base 5: mod_base = OTHER; note = 2'-O-methyladenosine-3'-phosphate
  modified_base 6: mod_base = OTHER; note = 2'-deoxy-2'-fluoroguanosine-3'-phosphate
  modified_base 7: mod_base = OTHER; note = 2'-O-methylguanosine-3'-phosphate
  modified_base 8: mod_base = OTHER; note = 2'-O-methyluridine-3'-phosphate
  modified_base 9: mod_base = OTHER; note = 2'-O-methylguanosine-3'-phosphate
  modified_base 10: mod_base = OTHER; note = 2'-O-methyladenosine-3'-phosphate
  modified_base 11: mod_base = OTHER; note = 2'-O-methylguanosine-3'-phosphate
  modified_base 12: mod_base = OTHER; note = 2'-O-methyluridine-3'-phosphate
  modified_base 13: mod_base = OTHER; note = 2'-O-methylcytidine-3'-phosphate
  modified_base 14: mod_base = OTHER; note = 2'-deoxy-2'-fluoroadenosine-3'-phosphate
  modified_base 15: mod_base = OTHER; note = 2'-O-methylguanosine-3'-phosphate
  modified_base 16: mod_base = OTHER; note = 2'-deoxy-2'-fluorouridine-3'-phosphate
  modified_base 17: mod_base = OTHER; note = 2'-O-methylguanosine-3'-phosphate
  modified_base 18: mod_base = OTHER; note = 2'-O-methylcytidine-3'-phosphate
  modified_base 19: mod_base = OTHER; note = 2'-O-methylguanosine-3'-phosphate
  modified_base 20: mod_base = OTHER; note = 2'-O-methyluridine-3'-phosphate
  modified_base 21: mod_base = OTHER; note = 2'-O-methylcytidine-3'-phosphate
  modified_base 22: mod_base = OTHER; note = 2'-O-methyladenosine-3'-phosphate
  modified_base 23: mod_base = OTHER; note = 2'-O-methylcytidine
ttctaggtgagtcagtgcgtcac

SEQ ID NO: 5323 - RNA, 23 nt, synthetic construct
  source 1..23: mol_type = other RNA
  modified_base 1: mod_base = OTHER; note = 2'-O-methyluridine-3'-phosphate 5'phosphate
  modified_base 2: mod_base = OTHER; note = 2'-deoxy-2'-fluorocytidine-3'-phosphate
  modified_base 3: mod_base = OTHER; note = 2'-O-methyluridine-3'-phosphate
  modified_base 4: mod_base = OTHER; note = 2'-O-methylcytidine-3'-phosphate
  modified_base 5: mod_base = OTHER; note = 2'-O-methyluridine-3'-phosphate
  modified_base 6: mod_base = OTHER; note = 2'-deoxy-2'-fluoroadenosine-3'-phosphate
  modified_base 7: mod_base = OTHER; note = 2'-O-methylguanosine-3'-phosphate
  modified_base 8: mod_base = OTHER; note = 2'-O-methylguanosine-3'-phosphate
  modified_base 9: mod_base = OTHER; note = 2'-O-methyluridine-3'-phosphate
  modified_base 10: mod_base = OTHER; note = 2'-O-methylguanosine-3'-phosphate
  modified_base 11: mod_base = OTHER; note = 2'-O-methyladenosine-3'-phosphate
  modified_base 12: mod_base = OTHER; note = 2'-O-methylguanosine-3'-phosphate
  modified_base 13: mod_base = OTHER; note = 2'-O-methyluridine-3'-phosphate
  modified_base 14: mod_base = OTHER; note = 2'-deoxy-2'-fluorocytidine-3'-phosphate
  modified_base 15: mod_base = OTHER; note = 2'-O-methyladenosine-3'-phosphate
  modified_base 16: mod_base = OTHER; note = 2'-deoxy-2'-fluoroguanosine-3'-phosphate
  modified_base 17: mod_base = OTHER; note = 2'-O-methyluridine-3'-phosphate
  modified_base 18: mod_base = OTHER; note = 2'-O-methylguanosine-3'-phosphate
  modified_base 19: mod_base = OTHER; note = 2'-O-methylcytidine-3'-phosphate
  modified_base 20: mod_base = OTHER; note = 2'-O-methylguanosine-3'-phosphate
  modified_base 21: mod_base = OTHER; note = 2'-O-methyluridine-3'-phosphate
  modified_base 22: mod_base = OTHER; note = 2'-O-methylcytidine-3'-phosphate
  modified_base 23: mod_base = OTHER; note = 2'-O-methyladenosine
tctctaggtgagtcagtgcgtca

SEQ ID NO: 5324 - RNA, 23 nt, synthetic construct
  source 1..23: mol_type = other RNA
  modified_base 1: mod_base = OTHER; note = 2'-O-methyluridine-3'-phosphate 5'phosphate
  modified_base 2: mod_base = OTHER; note = 2'-deoxy-2'-fluorocytidine-3'-phosphate
  modified_base 3: mod_base = OTHER; note = 2'-O-methylcytidine-3'-phosphate
  modified_base 4: mod_base = OTHER; note = 2'-O-methyluridine-3'-phosphate
  modified_base 5: mod_base = OTHER; note = 2'-O-methylcytidine-3'-phosphate
  modified_base 6: mod_base = OTHER; note = 2'-deoxy-2'-fluorouridine-3'-phosphate
  modified_base 7: mod_base = OTHER; note = 2'-O-methyladenosine-3'-phosphate
  modified_base 8: mod_base = OTHER; note = 2'-O-methylguanosine-3'-phosphate
  modified_base 9: mod_base = OTHER; note = 2'-O-methylguanosine-3'-phosphate
  modified_base 10: mod_base = OTHER; note = 2'-O-methyluridine-3'-phosphate
  modified_base 11: mod_base = OTHER; note = 2'-O-methylguanosine-3'-phosphate
  modified_base 12: mod_base = OTHER; note = 2'-O-methyladenosine-3'-phosphate
  modified_base 13: mod_base = OTHER; note = 2'-O-methylguanosine-3'-phosphate
  modified_base 14: mod_base = OTHER; note = 2'-deoxy-2'-fluorouridine-3'-phosphate
  modified_base 15: mod_base = OTHER; note = 2'-O-methylcytidine-3'-phosphate
  modified_base 16: mod_base = OTHER; note = 2'-deoxy-2'-fluoroadenosine-3'-phosphate
  modified_base 17: mod_base = OTHER; note = 2'-O-methylguanosine-3'-phosphate
  modified_base 18: mod_base = OTHER; note = 2'-O-methyluridine-3'-phosphate
  modified_base 19: mod_base = OTHER; note = 2'-O-methylguanosine-3'-phosphate
  modified_base 20: mod_base = OTHER; note = 2'-O-methylcytidine-3'-phosphate
  modified_base 21: mod_base = OTHER; note = 2'-O-methylguanosine-3'-phosphate
  modified_base 22: mod_base = OTHER; note = 2'-O-methyluridine-3'-phosphate
  modified_base 23: mod_base = OTHER; note = 2'-O-methylcytidine
tcctctaggtgagtcagtgcgtc

SEQ ID NO: 5325 - RNA, 23 nt, synthetic construct
  source 1..23: mol_type = other RNA
  modified_base 1: mod_base = OTHER; note = 2'-O-methyluridine-3'-phosphate 5'phosphate
  modified_base 2: mod_base = OTHER; note = 2'-deoxy-2'-fluoroguanosine-3'-phosphate
  modified_base 3: mod_base = OTHER; note = 2'-O-methylcytidine-3'-phosphate
  modified_base 4: mod_base = OTHER; note = 2'-O-methylcytidine-3'-phosphate
  modified_base 5: mod_base = OTHER; note = 2'-O-methyluridine-3'-phosphate
  modified_base 6: mod_base = OTHER; note = 2'-deoxy-2'-fluorocytidine-3'-phosphate
  modified_base 7: mod_base = OTHER; note = 2'-O-methyluridine-3'-phosphate
  modified_base 8: mod_base = OTHER; note = 2'-O-methyladenosine-3'-phosphate
  modified_base 9: mod_base = OTHER; note = 2'-O-methylguanosine-3'-phosphate
  modified_base 10: mod_base = OTHER; note = 2'-O-methylguanosine-3'-phosphate
  modified_base 11: mod_base = OTHER; note = 2'-O-methyluridine-3'-phosphate
  modified_base 12: mod_base = OTHER; note = 2'-O-methylguanosine-3'-phosphate
  modified_base 13: mod_base = OTHER; note = 2'-O-methyladenosine-3'-phosphate
  modified_base 14: mod_base = OTHER; note = 2'-deoxy-2'-fluoroguanosine-3'-phosphate
  modified_base 15: mod_base = OTHER; note = 2'-O-methyluridine-3'-phosphate
  modified_base 16: mod_base = OTHER; note = 2'-deoxy-2'-fluorocytidine-3'-phosphate
  modified_base 17: mod_base = OTHER; note = 2'-O-methyladenosine-3'-phosphate
  modified_base 18: mod_base = OTHER; note = 2'-O-methylguanosine-3'-phosphate
  modified_base 19: mod_base = OTHER; note = 2'-O-methyluridine-3'-phosphate
  modified_base 20: mod_base = OTHER; note = 2'-O-methylguanosine-3'-phosphate
  modified_base 21: mod_base = OTHER; note = 2'-O-methylcytidine-3'-phosphate
  modified_base 22: mod_base = OTHER; note = 2'-O-methylguanosine-3'-phosphate
  modified_base 23: mod_base = OTHER; note = 2'-O-methyluridine
tgcctctaggtgagtcagtgcgt

SEQ ID NO: 5326 - RNA, 23 nt, synthetic construct
  source 1..23: mol_type = other RNA
  modified_base 1: mod_base = OTHER; note = 2'-O-methyluridine-3'-phosphate 5'phosphate
  modified_base 2: mod_base = OTHER; note = 2'-deoxy-2'-fluoroadenosine-3'-phosphate
  modified_base 3: mod_base = OTHER; note = 2'-O-methylguanosine-3'-phosphate
  modified_base 4: mod_base = OTHER; note = 2'-O-methylcytidine-3'-phosphate
  modified_base 5: mod_base = OTHER; note = 2'-O-methylcytidine-3'-phosphate
  modified_base 6: mod_base = OTHER; note = 2'-deoxy-2'-fluorouridine-3'-phosphate
  modified_base 7: mod_base = OTHER; note = 2'-O-methylcytidine-3'-phosphate
  modified_base 8: mod_base = OTHER; note = 2'-O-methyluridine-3'-phosphate
  modified_base 9: mod_base = OTHER; note = 2'-O-methyladenosine-3'-phosphate
  modified_base 10: mod_base = OTHER; note = 2'-O-methylguanosine-3'-phosphate
  modified_base 11: mod_base = OTHER; note = 2'-O-methylguanosine-3'-phosphate
  modified_base 12: mod_base = OTHER; note = 2'-O-methyluridine-3'-phosphate
  modified_base 13: mod_base = OTHER; note = 2'-O-methylguanosine-3'-phosphate
  modified_base 14: mod_base = OTHER; note = 2'-deoxy-2'-fluoroadenosine-3'-phosphate
  modified_base 15: mod_base = OTHER; note = 2'-O-methylguanosine-3'-phosphate
  modified_base 16: mod_base = OTHER; note = 2'-deoxy-2'-fluorouridine-3'-phosphate
  modified_base 17: mod_base = OTHER; note = 2'-O-methylcytidine-3'-phosphate
  modified_base 18: mod_base = OTHER; note = 2'-O-methyladenosine-3'-phosphate
  modified_base 19: mod_base = OTHER; note = 2'-O-methylguanosine-3'-phosphate
  modified_base 20: mod_base = OTHER; note = 2'-O-methyluridine-3'-phosphate
  modified_base 21: mod_base = OTHER; note = 2'-O-methylguanosine-3'-phosphate
  modified_base 22: mod_base = OTHER; note = 2'-O-methylcytidine-3'-phosphate
  modified_base 23: mod_base = OTHER; note = 2'-O-methylguanosine
tagcctctaggtgagtcagtgcg

SEQ ID NO: 5327 - RNA, 23 nt, synthetic construct
  source 1..23: mol_type = other RNA
  modified_base 1: mod_base = OTHER; note = 2'-O-methyluridine-3'-phosphate 5'phosphate
  modified_base 2: mod_base = OTHER; note = 2'-deoxy-2'-fluorocytidine-3'-phosphate
  modified_base 3: mod_base = OTHER; note = 2'-O-methyladenosine-3'-phosphate
  modified_base 4: mod_base = OTHER; note = 2'-O-methylguanosine-3'-phosphate
  modified_base 5: mod_base = OTHER; note = 2'-O-methylcytidine-3'-phosphate
  modified_base 6: mod_base = OTHER; note = 2'-deoxy-2'-fluorocytidine-3'-phosphate
  modified_base 7: mod_base = OTHER; note = 2'-O-methyluridine-3'-phosphate
  modified_base 8: mod_base = OTHER; note = 2'-O-methylcytidine-3'-phosphate
  modified_base 9: mod_base = OTHER; note = 2'-O-methyluridine-3'-phosphate
  modified_base 10: mod_base = OTHER; note = 2'-O-methyladenosine-3'-phosphate
  modified_base 11: mod_base = OTHER; note = 2'-O-methylguanosine-3'-phosphate
  modified_base 12: mod_base = OTHER; note = 2'-O-methylguanosine-3'-phosphate
  modified_base 13: mod_base = OTHER; note = 2'-O-methyluridine-3'-phosphate
  modified_base 14: mod_base = OTHER; note = 2'-deoxy-2'-fluoroguanosine-3'-phosphate
  modified_base 15: mod_base = OTHER; note = 2'-O-methyladenosine-3'-phosphate
  modified_base 16: mod_base = OTHER; note = 2'-deoxy-2'-fluoroguanosine-3'-phosphate
  modified_base 17: mod_base = OTHER; note = 2'-O-methyluridine-3'-phosphate
  modified_base 18: mod_base = OTHER; note = 2'-O-methylcytidine-3'-phosphate
  modified_base 19: mod_base = OTHER; note = 2'-O-methyladenosine-3'-phosphate
  modified_base 20: mod_base = OTHER; note = 2'-O-methylguanosine-3'-phosphate
  modified_base 21: mod_base = OTHER; note = 2'-O-methyluridine-3'-phosphate
  modified_base 22: mod_base = OTHER; note = 2'-O-methylguanosine-3'-phosphate
  modified_base 23: mod_base = OTHER; note = 2'-O-methylcytidine
tcagcctctaggtgagtcagtgc

SEQ ID NO: 5328 - RNA, 23 nt, synthetic construct
  source 1..23: mol_type = other RNA
  modified_base 1: mod_base = OTHER; note = 2'-O-methyluridine-3'-phosphate 5'phosphate
  modified_base 2: mod_base = OTHER; note = 2'-deoxy-2'-fluorocytidine-3'-phosphate
  modified_base 3: mod_base = OTHER; note = 2'-O-methyluridine-3'-phosphate
  modified_base 4: mod_base = OTHER; note = 2'-O-methyladenosine-3'-phosphate
  modified_base 5: mod_base = OTHER; note = 2'-O-methyladenosine-3'-phosphate
  modified_base 6: mod_base = OTHER; note = 2'-deoxy-2'-fluoroadenosine-3'-phosphate
  modified_base 7: mod_base = OTHER; note = 2'-O-methyluridine-3'-phosphate
  modified_base 8: mod_base = OTHER; note = 2'-O-methylcytidine-3'-phosphate
  modified_base 9: mod_base = OTHER; note = 2'-O-methylcytidine-3'-phosphate
  modified_base 10: mod_base = OTHER; note = 2'-O-methylcytidine-3'-phosphate
  modified_base 11: mod_base = OTHER; note = 2'-O-methyluridine-3'-phosphate
  modified_base 12: mod_base = OTHER; note = 2'-O-methyladenosine-3'-phosphate
  modified_base 13: mod_base = OTHER; note = 2'-O-methylcytidine-3'-phosphate
  modified_base 14: mod_base = OTHER; note = 2'-deoxy-2'-fluorocytidine-3'-phosphate
  modified_base 15: mod_base = OTHER; note = 2'-O-methylcytidine-3'-phosphate
  modified_base 16: mod_base = OTHER; note = 2'-deoxy-2'-fluoroadenosine-3'-phosphate
  modified_base 17: mod_base = OTHER; note = 2'-O-methylcytidine-3'-phosphate
  modified_base 18: mod_base = OTHER; note = 2'-O-methylguanosine-3'-phosphate
  modified_base 19: mod_base = OTHER; note = 2'-O-methyluridine-3'-phosphate
  modified_base 20: mod_base = OTHER; note = 2'-O-methyluridine-3'-phosphate
  modified_base 21: mod_base = OTHER; note = 2'-O-methylcytidine-3'-phosphate
  modified_base 22: mod_base = OTHER; note = 2'-O-methylcytidine-3'-phosphate
  modified_base 23: mod_base = OTHER; note = 2'-O-methyladenosine
tctaaatccctacccacgttcca

SEQ ID NO: 5329 - RNA, 23 nt, synthetic construct
  source 1..23: mol_type = other RNA
  modified_base 1: mod_base = OTHER; note = 2'-O-methyluridine-3'-phosphate 5'phosphate
  modified_base 2: mod_base = OTHER; note = 2'-deoxy-2'-fluorouridine-3'-phosphate
  modified_base 3: mod_base = OTHER; note = 2'-O-methylguanosine-3'-phosphate
  modified_base 4: mod_base = OTHER; note = 2'-O-methylcytidine-3'-phosphate
  modified_base 5: mod_base = OTHER; note = 2'-O-methyluridine-3'-phosphate
  modified_base 6: mod_base = OTHER; note = 2'-deoxy-2'-fluoroadenosine-3'-phosphate
  modified_base 7: mod_base = OTHER; note = 2'-O-methyladenosine-3'-phosphate
  modified_base 8: mod_base = OTHER; note = 2'-O-methyladenosine-3'-phosphate
  modified_base 9: mod_base = OTHER; note = 2'-O-methyluridine-3'-phosphate
  modified_base 10: mod_base = OTHER; note = 2'-O-methylcytidine-3'-phosphate
  modified_base 11: mod_base = OTHER; note = 2'-O-methylcytidine-3'-phosphate
  modified_base 12: mod_base = OTHER; note = 2'-O-methylcytidine-3'-phosphate
  modified_base 13: mod_base = OTHER; note = 2'-O-methyluridine-3'-phosphate
  modified_base 14: mod_base = OTHER; note = 2'-deoxy-2'-fluoroadenosine-3'-phosphate
  modified_base 15: mod_base = OTHER; note = 2'-O-methylcytidine-3'-phosphate
  modified_base 16: mod_base = OTHER; note = 2'-deoxy-2'-fluorocytidine-3'-phosphate
  modified_base 17: mod_base = OTHER; note = 2'-O-methylcytidine-3'-phosphate
  modified_base 18: mod_base = OTHER; note = 2'-O-methyladenosine-3'-phosphate
  modified_base 19: mod_base = OTHER; note = 2'-O-methylcytidine-3'-phosphate
  modified_base 20: mod_base = OTHER; note = 2'-O-methylguanosine-3'-phosphate
  modified_base 21: mod_base = OTHER; note = 2'-O-methyluridine-3'-phosphate
  modified_base 22: mod_base = OTHER; note = 2'-O-methyluridine-3'-phosphate
  modified_base 23: mod_base = OTHER; note = 2'-O-methylcytidine
ttgctaaatccctacccacgttc

SEQ ID NO: 5330 - RNA, 23 nt, synthetic construct
  source 1..23: mol_type = other RNA
  modified_base 1: mod_base = OTHER; note = 2'-O-methyluridine-3'-phosphate 5'phosphate
  modified_base 2: mod_base = OTHER; note = 2'-deoxy-2'-fluoroguanosine-3'-phosphate
  modified_base 3: mod_base = OTHER; note = 2'-O-methylcytidine-3'-phosphate
  modified_base 4: mod_base = OTHER; note = 2'-O-methyladenosine-3'-phosphate
  modified_base 5: mod_base = OTHER; note = 2'-O-methyluridine-3'-phosphate
  modified_base 6: mod_base = OTHER; note = 2'-deoxy-2'-fluoroguanosine-3'-phosphate
  modified_base 7: mod_base = OTHER; note = 2'-O-methylcytidine-3'-phosphate
  modified_base 8: mod_base = OTHER; note = 2'-O-methyluridine-3'-phosphate
  modified_base 9: mod_base = OTHER; note = 2'-O-methyladenosine-3'-phosphate
  modified_base 10: mod_base = OTHER; note = 2'-O-methyladenosine-3'-phosphate
  modified_base 11: mod_base = OTHER; note = 2'-O-methyladenosine-3'-phosphate
  modified_base 12: mod_base = OTHER; note = 2'-O-methyluridine-3'-phosphate
  modified_base 13: mod_base = OTHER; note = 2'-O-methylcytidine-3'-phosphate
  modified_base 14: mod_base = OTHER; note = 2'-deoxy-2'-fluorocytidine-3'-phosphate
  modified_base 15: mod_base = OTHER; note = 2'-O-methylcytidine-3'-phosphate
  modified_base 16: mod_base = OTHER; note = 2'-deoxy-2'-fluorouridine-3'-phosphate
  modified_base 17: mod_base = OTHER; note = 2'-O-methyladenosine-3'-phosphate
  modified_base 18: mod_base = OTHER; note = 2'-O-methylcytidine-3'-phosphate
  modified_base 19: mod_base = OTHER; note = 2'-O-methylcytidine-3'-phosphate
  modified_base 20: mod_base = OTHER; note = 2'-O-methylcytidine-3'-phosphate
  modified_base 21: mod_base = OTHER; note = 2'-O-methyladenosine-3'-phosphate
  modified_base 22: mod_base = OTHER; note = 2'-O-methylcytidine-3'-phosphate
  modified_base 23: mod_base = OTHER; note = 2'-O-methylguanosine
tgcatgctaaatccctacccacg

SEQ ID NO: 5331 - RNA, 23 nt, synthetic construct
  source 1..23: mol_type = other RNA
  modified_base 1: mod_base = OTHER; note = 2'-O-methyluridine-3'-phosphate 5'phosphate
  modified_base 2: mod_base = OTHER; note = 2'-deoxy-2'-fluoroadenosine-3'-phosphate
  modified_base 3: mod_base = OTHER; note = 2'-O-methylguanosine-3'-phosphate
  modified_base 4: mod_base = OTHER; note = 2'-O-methylcytidine-3'-phosphate
  modified_base 5: mod_base = OTHER; note = 2'-O-methyladenosine-3'-phosphate
  modified_base 6: mod_base = OTHER; note = 2'-deoxy-2'-fluorouridine-3'-phosphate
  modified_base 7: mod_base = OTHER; note = 2'-O-methylguanosine-3'-phosphate
  modified_base 8: mod_base = OTHER; note = 2'-O-methylcytidine-3'-phosphate
  modified_base 9: mod_base = OTHER; note = 2'-O-methyluridine-3'-phosphate
  modified_base 10: mod_base = OTHER; note = 2'-O-methyladenosine-3'-phosphate
  modified_base 11: mod_base = OTHER; note = 2'-O-methyladenosine-3'-phosphate
  modified_base 12: mod_base = OTHER; note = 2'-O-methyladenosine-3'-phosphate
  modified_base 13: mod_base = OTHER; note = 2'-O-methyluridine-3'-phosphate
  modified_base 14: mod_base = OTHER; note = 2'-deoxy-2'-fluorocytidine-3'-phosphate
  modified_base 15: mod_base = OTHER; note = 2'-O-methylcytidine-3'-phosphate
  modified_base 16: mod_base = OTHER; note = 2'-deoxy-2'-fluorocytidine-3'-phosphate
  modified_base 17: mod_base = OTHER; note = 2'-O-methyluridine-3'-phosphate
  modified_base 18: mod_base = OTHER; note = 2'-O-methyladenosine-3'-phosphate
  modified_base 19: mod_base = OTHER; note = 2'-O-methylcytidine-3'-phosphate
  modified_base 20: mod_base = OTHER; note = 2'-O-methylcytidine-3'-phosphate
  modified_base 21: mod_base = OTHER; note = 2'-O-methylcytidine-3'-phosphate
  modified_base 22: mod_base = OTHER; note = 2'-O-methyladenosine-3'-phosphate
  modified_base 23: mod_base = OTHER; note = 2'-O-methylcytidine
tagcatgctaaatccctacccac

SEQ ID NO: 5332 - RNA, 23 nt, synthetic construct
  source 1..23: mol_type = other RNA
  modified_base 1: mod_base = OTHER; note = 2'-O-methyluridine-3'-phosphate 5'phosphate
  modified_base 2: mod_base = OTHER; note = 2'-deoxy-2'-fluorocytidine-3'-phosphate
  modified_base 3: mod_base = OTHER; note = 2'-O-methyladenosine-3'-phosphate
  modified_base 4: mod_base = OTHER; note = 2'-O-methylguanosine-3'-phosphate
  modified_base 5: mod_base = OTHER; note = 2'-O-methylcytidine-3'-phosphate
  modified_base 6: mod_base = OTHER; note = 2'-deoxy-2'-fluoroadenosine-3'-phosphate
  modified_base 7: mod_base = OTHER; note = 2'-O-methyluridine-3'-phosphate
  modified_base 8: mod_base = OTHER; note = 2'-O-methylguanosine-3'-phosphate
  modified_base 9: mod_base = OTHER; note = 2'-O-methylcytidine-3'-phosphate
  modified_base 10: mod_base = OTHER; note = 2'-O-methyluridine-3'-phosphate
  modified_base 11: mod_base = OTHER; note = 2'-O-methyladenosine-3'-phosphate
  modified_base 12: mod_base = OTHER; note = 2'-O-methyladenosine-3'-phosphate
  modified_base 13: mod_base = OTHER; note = 2'-O-methyladenosine-3'-phosphate
  modified_base 14: mod_base = OTHER; note = 2'-deoxy-2'-fluorouridine-3'-phosphate
  modified_base 15: mod_base = OTHER; note = 2'-O-methylcytidine-3'-phosphate
  modified_base 16: mod_base = OTHER; note = 2'-deoxy-2'-fluorocytidine-3'-phosphate
  modified_base 17: mod_base = OTHER; note = 2'-O-methylcytidine-3'-phosphate
  modified_base 18: mod_base = OTHER; note = 2'-O-methyluridine-3'-phosphate
  modified_base 19: mod_base = OTHER; note = 2'-O-methyladenosine-3'-phosphate
  modified_base 20: mod_base = OTHER; note = 2'-O-methylcytidine-3'-phosphate
  modified_base 21: mod_base = OTHER; note = 2'-O-methylcytidine-3'-phosphate
  modified_base 22: mod_base = OTHER; note = 2'-O-methylcytidine-3'-phosphate
  modified_base 23: mod_base = OTHER; note = 2'-O-methyladenosine
tcagcatgctaaatccctaccca

SEQ ID NO: 5333 - RNA, 23 nt, synthetic construct
  source 1..23: mol_type = other RNA
  modified_base 1: mod_base = OTHER; note = 2'-O-methyluridine-3'-phosphate 5'phosphate
  modified_base 2: mod_base = OTHER; note = 2'-deoxy-2'-fluorocytidine-3'-phosphate
  modified_base 3: mod_base = OTHER; note = 2'-O-methylcytidine-3'-phosphate
  modified_base 4: mod_base = OTHER; note = 2'-O-methyladenosine-3'-phosphate
  modified_base 5: mod_base = OTHER; note = 2'-O-methylguanosine-3'-phosphate
  modified_base 6: mod_base = OTHER; note = 2'-deoxy-2'-fluorocytidine-3'-phosphate
  modified_base 7: mod_base = OTHER; note = 2'-O-methyladenosine-3'-phosphate
  modified_base 8: mod_base = OTHER; note = 2'-O-methyluridine-3'-phosphate
  modified_base 9: mod_base = OTHER; note = 2'-O-methylguanosine-3'-phosphate
  modified_base 10: mod_base = OTHER; note = 2'-O-methylcytidine-3'-phosphate
  modified_base 11: mod_base = OTHER; note = 2'-O-methyluridine-3'-phosphate
  modified_base 12: mod_base = OTHER; note = 2'-O-methyladenosine-3'-phosphate
  modified_base 13: mod_base = OTHER; note = 2'-O-methyladenosine-3'-phosphate
  modified_base 14: mod_base = OTHER; note = 2'-deoxy-2'-fluoroadenosine-3'-phosphate
  modified_base 15: mod_base = OTHER; note = 2'-O-methyluridine-3'-phosphate
  modified_base 16: mod_base = OTHER; note = 2'-deoxy-2'-fluorocytidine-3'-phosphate
  modified_base 17: mod_base = OTHER; note = 2'-O-methylcytidine-3'-phosphate
  modified_base 18: mod_base = OTHER; note = 2'-O-methylcytidine-3'-phosphate
  modified_base 19: mod_base = OTHER; note = 2'-O-methyluridine-3'-phosphate
  modified_base 20: mod_base = OTHER; note = 2'-O-methyladenosine-3'-phosphate
  modified_base 21: mod_base = OTHER; note = 2'-O-methylcytidine-3'-phosphate
  modified_base 22: mod_base = OTHER; note = 2'-O-methylcytidine-3'-phosphate
  modified_base 23: mod_base = OTHER; note = 2'-O-methylcytidine
tccagcatgctaaatccctaccc

SEQ ID NO: 5334 - RNA, 23 nt, synthetic construct
  source 1..23: mol_type = other RNA
  modified_base 1: mod_base = OTHER; note = 2'-O-methyluridine-3'-phosphate 5'phosphate
  modified_base 2: mod_base = OTHER; note = 2'-deoxy-2'-fluorouridine-3'-phosphate
  modified_base 3: mod_base = OTHER; note = 2'-O-methylcytidine-3'-phosphate
  modified_base 4: mod_base = OTHER; note = 2'-O-methylcytidine-3'-phosphate
  modified_base 5: mod_base = OTHER; note = 2'-O-methyladenosine-3'-phosphate
  modified_base 6: mod_base = OTHER; note = 2'-deoxy-2'-fluoroguanosine-3'-phosphate
  modified_base 7: mod_base = OTHER; note = 2'-O-methylcytidine-3'-phosphate
  modified_base 8: mod_base = OTHER; note = 2'-O-methyladenosine-3'-phosphate
  modified_base 9: mod_base = OTHER; note = 2'-O-methyluridine-3'-phosphate
  modified_base 10: mod_base = OTHER; note = 2'-O-methylguanosine-3'-phosphate
  modified_base 11: mod_base = OTHER; note = 2'-O-methylcytidine-3'-phosphate
  modified_base 12: mod_base = OTHER; note = 2'-O-methyluridine-3'-phosphate
  modified_base 13: mod_base = OTHER; note = 2'-O-methyladenosine-3'-phosphate
  modified_base 14: mod_base = OTHER; note = 2'-deoxy-2'-fluoroadenosine-3'-phosphate
  modified_base 15: mod_base = OTHER; note = 2'-O-methyladenosine-3'-phosphate
  modified_base 16: mod_base = OTHER; note = 2'-deoxy-2'-fluorouridine-3'-phosphate
  modified_base 17: mod_base = OTHER; note = 2'-O-methylcytidine-3'-phosphate
  modified_base 18: mod_base = OTHER; note = 2'-O-methylcytidine-3'-phosphate
  modified_base 19: mod_base = OTHER; note = 2'-O-methylcytidine-3'-phosphate
  modified_base 20: mod_base = OTHER; note = 2'-O-methyluridine-3'-phosphate
  modified_base 21: mod_base = OTHER; note = 2'-O-methyladenosine-3'-phosphate
  modified_base 22: mod_base = OTHER; note = 2'-O-methylcytidine-3'-phosphate
  modified_base 23: mod_base = OTHER; note = 2'-O-methylcytidine
ttccagcatgctaaatccctacc

SEQ ID NO: 5335 - RNA, 23 nt, synthetic construct
  source 1..23: mol_type = other RNA
  modified_base 1: mod_base = OTHER; note = 2'-O-methyluridine-3'-phosphate 5'phosphate
  modified_base 2: mod_base = OTHER; note = 2'-deoxy-2'-fluoroguanosine-3'-phosphate
  modified_base 3: mod_base = OTHER; note = 2'-O-methyluridine-3'-phosphate
  modified_base 4: mod_base = OTHER; note = 2'-O-methyluridine-3'-phosphate
  modified_base 5: mod_base = OTHER; note = 2'-O-methyladenosine-3'-phosphate
  modified_base 6: mod_base = OTHER; note = 2'-deoxy-2'-fluorouridine-3'-phosphate
  modified_base 7: mod_base = OTHER; note = 2'-O-methyluridine-3'-phosphate
  modified_base 8: mod_base = OTHER; note = 2'-O-methyluridine-3'-phosphate
  modified_base 9: mod_base = OTHER; note = 2'-O-methylcytidine-3'-phosphate
  modified_base 10: mod_base = OTHER; note = 2'-O-methylcytidine-3'-phosphate
  modified_base 11: mod_base = OTHER; note = 2'-O-methyladenosine-3'-phosphate
  modified_base 12: mod_base = OTHER; note = 2'-O-methylguanosine-3'-phosphate
  modified_base 13: mod_base = OTHER; note = 2'-O-methylcytidine-3'-phosphate
  modified_base 14: mod_base = OTHER; note = 2'-deoxy-2'-fluoroadenosine-3'-phosphate
  modified_base 15: mod_base = OTHER; note = 2'-O-methyluridine-3'-phosphate
  modified_base 16: mod_base = OTHER; note = 2'-deoxy-2'-fluoroguanosine-3'-phosphate
  modified_base 17: mod_base = OTHER; note = 2'-O-methylcytidine-3'-phosphate
  modified_base 18: mod_base = OTHER; note = 2'-O-methyluridine-3'-phosphate
  modified_base 19: mod_base = OTHER; note = 2'-O-methyladenosine-3'-phosphate
  modified_base 20: mod_base = OTHER; note = 2'-O-methyladenosine-3'-phosphate
  modified_base 21: mod_base = OTHER; note = 2'-O-methyladenosine-3'-phosphate
  modified_base 22: mod_base = OTHER; note = 2'-O-methyluridine-3'-phosphate
  modified_base 23: mod_base = OTHER; note = 2'-O-methylcytidine
tgttatttccagcatgctaaatc

SEQ ID NO: 5336 - RNA, 23 nt, synthetic construct
  source 1..23: mol_type = other RNA
  modified_base 1: mod_base = OTHER; note = 2'-O-methyluridine-3'-phosphate 5'phosphate
  modified_base 2: mod_base = OTHER; note = 2'-deoxy-2'-fluoroadenosine-3'-phosphate
  modified_base 3: mod_base = OTHER; note = 2'-O-methylguanosine-3'-phosphate
  modified_base 4: mod_base = OTHER; note = 2'-O-methyluridine-3'-phosphate
  modified_base 5: mod_base = OTHER; note = 2'-O-methyluridine-3'-phosphate
  modified_base 6: mod_base = OTHER; note = 2'-deoxy-2'-fluoroadenosine-3'-phosphate
  modified_base 7: mod_base = OTHER; note = 2'-O-methyluridine-3'-phosphate
  modified_base 8: mod_base = OTHER; note = 2'-O-methyluridine-3'-phosphate
  modified_base 9: mod_base = OTHER; note = 2'-O-methyluridine-3'-phosphate
  modified_base 10: mod_base = OTHER; note = 2'-O-methylcytidine-3'-phosphate
  modified_base 11: mod_base = OTHER; note = 2'-O-methylcytidine-3'-phosphate
  modified_base 12: mod_base = OTHER; note = 2'-O-methyladenosine-3'-phosphate
  modified_base 13: mod_base = OTHER; note = 2'-O-methylguanosine-3'-phosphate
  modified_base 14: mod_base = OTHER; note = 2'-deoxy-2'-fluorocytidine-3'-phosphate
  modified_base 15: mod_base = OTHER; note = 2'-O-methyladenosine-3'-phosphate
  modified_base 16: mod_base = OTHER; note = 2'-deoxy-2'-fluorouridine-3'-phosphate
  modified_base 17: mod_base = OTHER; note = 2'-O-methylguanosine-3'-phosphate
  modified_base 18: mod_base = OTHER; note = 2'-O-methylcytidine-3'-phosphate
  modified_base 19: mod_base = OTHER; note = 2'-O-methyluridine-3'-phosphate
  modified_base 20: mod_base = OTHER; note = 2'-O-methyladenosine-3'-phosphate
  modified_base 21: mod_base = OTHER; note = 2'-O-methyladenosine-3'-phosphate
  modified_base 22: mod_base = OTHER; note = 2'-O-methyladenosine-3'-phosphate
  modified_base 23: mod_base = OTHER; note = 2'-O-methyluridine
tagttatttccagcatgctaaat

SEQ ID NO: 5337 - RNA, 23 nt, synthetic construct
  source 1..23: mol_type = other RNA
  modified_base 1: mod_base = OTHER; note = 2'-O-methyluridine-3'-phosphate 5'phosphate
  modified_base 2: mod_base = OTHER; note = 2'-deoxy-2'-fluorocytidine-3'-phosphate
  modified_base 3: mod_base = OTHER; note = 2'-O-methyladenosine-3'-phosphate
  modified_base 4: mod_base = OTHER; note = 2'-O-methylguanosine-3'-phosphate
  modified_base 5: mod_base = OTHER; note = 2'-O-methyluridine-3'-phosphate
  modified_base 6: mod_base = OTHER; note = 2'-deoxy-2'-fluorouridine-3'-phosphate
  modified_base 7: mod_base = OTHER; note = 2'-O-methyladenosine-3'-phosphate
  modified_base 8: mod_base = OTHER; note = 2'-O-methyluridine-3'-phosphate
  modified_base 9: mod_base = OTHER; note = 2'-O-methyluridine-3'-phosphate
  modified_base 10: mod_base = OTHER; note = 2'-O-methyluridine-3'-phosphate
  modified_base 11: mod_base = OTHER; note = 2'-O-methylcytidine-3'-phosphate
  modified_base 12: mod_base = OTHER; note = 2'-O-methylcytidine-3'-phosphate
  modified_base 13: mod_base = OTHER; note = 2'-O-methyladenosine-3'-phosphate
  modified_base 14: mod_base = OTHER; note = 2'-deoxy-2'-fluoroguanosine-3'-phosphate
  modified_base 15: mod_base = OTHER; note = 2'-O-methylcytidine-3'-phosphate
  modified_base 16: mod_base = OTHER; note = 2'-deoxy-2'-fluoroadenosine-3'-phosphate
  modified_base 17: mod_base = OTHER; note = 2'-O-methyluridine-3'-phosphate
  modified_base 18: mod_base = OTHER; note = 2'-O-methylguanosine-3'-phosphate
  modified_base 19: mod_base = OTHER; note = 2'-O-methylcytidine-3'-phosphate
  modified_base 20: mod_base = OTHER; note = 2'-O-methyluridine-3'-phosphate
  modified_base 21: mod_base = OTHER; note = 2'-O-methyladenosine-3'-phosphate
  modified_base 22: mod_base = OTHER; note = 2'-O-methyladenosine-3'-phosphate
  modified_base 23: mod_base = OTHER; note = 2'-O-methyladenosine
tcagttatttccagcatgctaaa

SEQ ID NO: 5338 - RNA, 23 nt, synthetic construct
  source 1..23: mol_type = other RNA
  modified_base 1: mod_base = OTHER; note = 2'-O-methyluridine-3'-phosphate 5'phosphate
  modified_base 2: mod_base = OTHER; note = 2'-deoxy-2'-fluorocytidine-3'-phosphate
  modified_base 3: mod_base = OTHER; note = 2'-O-methylcytidine-3'-phosphate
  modified_base 4: mod_base = OTHER; note = 2'-O-methyladenosine-3'-phosphate
  modified_base 5: mod_base = OTHER; note = 2'-O-methylguanosine-3'-phosphate
  modified_base 6: mod_base = OTHER; note = 2'-deoxy-2'-fluorouridine-3'-phosphate
  modified_base 7: mod_base = OTHER; note = 2'-O-methyluridine-3'-phosphate
  modified_base 8: mod_base = OTHER; note = 2'-O-methyladenosine-3'-phosphate
  modified_base 9: mod_base = OTHER; note = 2'-O-methyluridine-3'-phosphate
  modified_base 10: mod_base = OTHER; note = 2'-O-methyluridine-3'-phosphate
  modified_base 11: mod_base = OTHER; note = 2'-O-methyluridine-3'-phosphate
  modified_base 12: mod_base = OTHER; note = 2'-O-methylcytidine-3'-phosphate
  modified_base 13: mod_base = OTHER; note = 2'-O-methylcytidine-3'-phosphate
  modified_base 14: mod_base = OTHER; note = 2'-deoxy-2'-fluoroadenosine-3'-phosphate
  modified_base 15: mod_base = OTHER; note = 2'-O-methylguanosine-3'-phosphate
  modified_base 16: mod_base = OTHER; note = 2'-deoxy-2'-fluorocytidine-3'-phosphate
  modified_base 17: mod_base = OTHER; note = 2'-O-methyladenosine-3'-phosphate
  modified_base 18: mod_base = OTHER; note = 2'-O-methyluridine-3'-phosphate
  modified_base 19: mod_base = OTHER; note = 2'-O-methylguanosine-3'-phosphate
  modified_base 20: mod_base = OTHER; note = 2'-O-methylcytidine-3'-phosphate
  modified_base 21: mod_base = OTHER; note = 2'-O-methyluridine-3'-phosphate
  modified_base 22: mod_base = OTHER; note = 2'-O-methyladenosine-3'-phosphate
  modified_base 23: mod_base = OTHER; note = 2'-O-methyladenosine
tccagttatttccagcatgctaa

SEQ ID NO: 5339 - RNA, 23 nt, synthetic construct
  source 1..23: mol_type = other RNA
  modified_base 1: mod_base = OTHER; note = 2'-O-methyluridine-3'-phosphate 5'phosphate
  modified_base 2: mod_base = OTHER; note = 2'-deoxy-2'-fluoroguanosine-3'-phosphate
  modified_base 3: mod_base = OTHER; note = 2'-O-methylcytidine-3'-phosphate
  modified_base 4: mod_base = OTHER; note = 2'-O-methylcytidine-3'-phosphate
  modified_base 5: mod_base = OTHER; note = 2'-O-methyladenosine-3'-phosphate
  modified_base 6: mod_base = OTHER; note = 2'-deoxy-2'-fluoroguanosine-3'-phosphate
  modified_base 7: mod_base = OTHER; note = 2'-O-methyluridine-3'-phosphate
  modified_base 8: mod_base = OTHER; note = 2'-O-methyluridine-3'-phosphate
  modified_base 9: mod_base = OTHER; note = 2'-O-methyladenosine-3'-phosphate
  modified_base 10: mod_base = OTHER; note = 2'-O-methyluridine-3'-phosphate
  modified_base 11: mod_base = OTHER; note = 2'-O-methyluridine-3'-phosphate
  modified_base 12: mod_base = OTHER; note = 2'-O-methyluridine-3'-phosphate
  modified_base 13: mod_base = OTHER; note = 2'-O-methylcytidine-3'-phosphate
  modified_base 14: mod_base = OTHER; note = 2'-deoxy-2'-fluorocytidine-3'-phosphate
  modified_base 15: mod_base = OTHER; note = 2'-O-methyladenosine-3'-phosphate
  modified_base 16: mod_base = OTHER; note = 2'-deoxy-2'-fluoroguanosine-3'-phosphate
  modified_base 17: mod_base = OTHER; note = 2'-O-methylcytidine-3'-phosphate
  modified_base 18: mod_base = OTHER; note = 2'-O-methyladenosine-3'-phosphate
  modified_base 19: mod_base = OTHER; note = 2'-O-methyluridine-3'-phosphate
  modified_base 20: mod_base = OTHER; note = 2'-O-methylguanosine-3'-phosphate
  modified_base 21: mod_base = OTHER; note = 2'-O-methylcytidine-3'-phosphate
  modified_base 22: mod_base = OTHER; note = 2'-O-methyluridine-3'-phosphate
  modified_base 23: mod_base = OTHER; note = 2'-O-methyladenosine
tgccagttatttccagcatgcta

SEQ ID NO: 5340 - RNA, 23 nt, synthetic construct
  source 1..23: mol_type = other RNA
  modified_base 1: mod_base = OTHER; note = 2'-O-methyluridine-3'-phosphate 5'phosphate
  modified_base 2: mod_base = OTHER; note = 2'-deoxy-2'-fluorouridine-3'-phosphate
  modified_base 3: mod_base = OTHER; note = 2'-O-methylguanosine-3'-phosphate
  modified_base 4: mod_base = OTHER; note = 2'-O-methylcytidine-3'-phosphate
  modified_base 5: mod_base = OTHER; note = 2'-O-methylcytidine-3'-phosphate
  modified_base 6: mod_base = OTHER; note = 2'-deoxy-2'-fluoroadenosine-3'-phosphate
  modified_base 7: mod_base = OTHER; note = 2'-O-methylguanosine-3'-phosphate
  modified_base 8: mod_base = OTHER; note = 2'-O-methyluridine-3'-phosphate
  modified_base 9: mod_base = OTHER; note = 2'-O-methyluridine-3'-phosphate
  modified_base 10: mod_base = OTHER; note = 2'-O-methyladenosine-3'-phosphate
  modified_base 11: mod_base = OTHER; note = 2'-O-methyluridine-3'-phosphate
  modified_base 12: mod_base = OTHER; note = 2'-O-methyluridine-3'-phosphate
  modified_base 13: mod_base = OTHER; note = 2'-O-methyluridine-3'-phosphate
  modified_base 14: mod_base = OTHER; note = 2'-deoxy-2'-fluorocytidine-3'-phosphate
  modified_base 15: mod_base = OTHER; note = 2'-O-methylcytidine-3'-phosphate
  modified_base 16: mod_base = OTHER; note = 2'-deoxy-2'-fluoroadenosine-3'-phosphate
  modified_base 17: mod_base = OTHER; note = 2'-O-methylguanosine-3'-phosphate
  modified_base 18: mod_base = OTHER; note = 2'-O-methylcytidine-3'-phosphate
  modified_base 19: mod_base = OTHER; note = 2'-O-methyladenosine-3'-phosphate
  modified_base 20: mod_base = OTHER; note = 2'-O-methyluridine-3'-phosphate
  modified_base 21: mod_base = OTHER; note = 2'-O-methylguanosine-3'-phosphate
  modified_base 22: mod_base = OTHER; note = 2'-O-methylcytidine-3'-phosphate
  modified_base 23: mod_base = OTHER; note = 2'-O-methyluridine
ttgccagttatttccagcatgct

SEQ ID NO: 5341 - RNA, 23 nt, synthetic construct
  source 1..23: mol_type = other RNA
  modified_base 1: mod_base = OTHER; note = 2'-O-methyluridine-3'-phosphate 5'phosphate
  modified_base 2: mod_base = OTHER; note = 2'-deoxy-2'-fluorocytidine-3'-phosphate
  modified_base 3: mod_base = OTHER; note = 2'-O-methyluridine-3'-phosphate
  modified_base 4: mod_base = OTHER; note = 2'-O-methylguanosine-3'-phosphate
  modified_base 5: mod_base = OTHER; note = 2'-O-methylcytidine-3'-phosphate
  modified_base 6: mod_base = OTHER; note = 2'-deoxy-2'-fluorocytidine-3'-phosphate
  modified_base 7: mod_base = OTHER; note = 2'-O-methyladenosine-3'-phosphate
  modified_base 8: mod_base = OTHER; note = 2'-O-methylguanosine-3'-phosphate
  modified_base 9: mod_base = OTHER; note = 2'-O-methyluridine-3'-phosphate
  modified_base 10: mod_base = OTHER; note = 2'-O-methyluridine-3'-phosphate
  modified_base 11: mod_base = OTHER; note = 2'-O-methyladenosine-3'-phosphate
  modified_base 12: mod_base = OTHER; note = 2'-O-methyluridine-3'-phosphate
  modified_base 13: mod_base = OTHER; note = 2'-O-methyluridine-3'-phosphate
  modified_base 14: mod_base = OTHER; note = 2'-deoxy-2'-fluorouridine-3'-phosphate
  modified_base 15: mod_base = OTHER; note = 2'-O-methylcytidine-3'-phosphate
  modified_base 16: mod_base = OTHER; note = 2'-deoxy-2'-fluorocytidine-3'-phosphate
  modified_base 17: mod_base = OTHER; note = 2'-O-methyladenosine-3'-phosphate
  modified_base 18: mod_base = OTHER; note = 2'-O-methylguanosine-3'-phosphate
  modified_base 19: mod_base = OTHER; note = 2'-O-methylcytidine-3'-phosphate
  modified_base 20: mod_base = OTHER; note = 2'-O-methyladenosine-3'-phosphate
  modified_base 21: mod_base = OTHER; note = 2'-O-methyluridine-3'-phosphate
  modified_base 22: mod_base = OTHER; note = 2'-O-methylguanosine-3'-phosphate
  modified_base 23: mod_base = OTHER; note = 2'-O-methylcytidine
tctgccagttatttccagcatgc

SEQ ID NO: 5342 - RNA, 23 nt, synthetic construct
  source 1..23: mol_type = other RNA
  modified_base 1: mod_base = OTHER; note = 2'-O-methyluridine-3'-phosphate 5'phosphate
  modified_base 2: mod_base = OTHER; note = 2'-deoxy-2'-fluoroadenosine-3'-phosphate
  modified_base 3: mod_base = OTHER; note = 2'-O-methylcytidine-3'-phosphate
  modified_base 4: mod_base = OTHER; note = 2'-O-methyluridine-3'-phosphate
  modified_base 5: mod_base = OTHER; note = 2'-O-methylguanosine-3'-phosphate
  modified_base 6: mod_base = OTHER; note = 2'-deoxy-2'-fluorocytidine-3'-phosphate
  modified_base 7: mod_base = OTHER; note = 2'-O-methylcytidine-3'-phosphate
  modified_base 8: mod_base = OTHER; note = 2'-O-methyladenosine-3'-phosphate
  modified_base 9: mod_base = OTHER; note = 2'-O-methylguanosine-3'-phosphate
  modified_base 10: mod_base = OTHER; note = 2'-O-methyluridine-3'-phosphate
  modified_base 11: mod_base = OTHER; note = 2'-O-methyluridine-3'-phosphate
  modified_base 12: mod_base = OTHER; note = 2'-O-methyladenosine-3'-phosphate
  modified_base 13: mod_base = OTHER; note = 2'-O-methyluridine-3'-phosphate
  modified_base 14: mod_base = OTHER; note = 2'-deoxy-2'-fluorouridine-3'-phosphate
  modified_base 15: mod_base = OTHER; note = 2'-O-methyluridine-3'-phosphate
  modified_base 16: mod_base = OTHER; note = 2'-deoxy-2'-fluorocytidine-3'-phosphate
  modified_base 17: mod_base = OTHER; note = 2'-O-methylcytidine-3'-phosphate
  modified_base 18: mod_base = OTHER; note = 2'-O-methyladenosine-3'-phosphate
  modified_base 19: mod_base = OTHER; note = 2'-O-methylguanosine-3'-phosphate
  modified_base 20: mod_base = OTHER; note = 2'-O-methylcytidine-3'-phosphate
  modified_base 21: mod_base = OTHER; note = 2'-O-methyladenosine-3'-phosphate
  modified_base 22: mod_base = OTHER; note = 2'-O-methyluridine-3'-phosphate
  modified_base 23: mod_base = OTHER; note = 2'-O-methylguanosine
tactgccagttatttccagcatg

SEQ ID NO: 5343 - RNA, 23 nt, synthetic construct
  source 1..23: mol_type = other RNA
  modified_base 1: mod_base = OTHER; note = 2'-O-methyluridine-3'-phosphate 5'phosphate
  modified_base 2: mod_base = OTHER; note = 2'-deoxy-2'-fluorouridine-3'-phosphate
  modified_base 3: mod_base = OTHER; note = 2'-O-methyladenosine-3'-phosphate
  modified_base 4: mod_base = OTHER; note = 2'-O-methylcytidine-3'-phosphate
  modified_base 5: mod_base = OTHER; note = 2'-O-methyluridine-3'-phosphate
  modified_base 6: mod_base = OTHER; note = 2'-deoxy-2'-fluoroguanosine-3'-phosphate
  modified_base 7: mod_base = OTHER; note = 2'-O-methylcytidine-3'-phosphate
  modified_base 8: mod_base = OTHER; note = 2'-O-methylcytidine-3'-phosphate
  modified_base 9: mod_base = OTHER; note = 2'-O-methyladenosine-3'-phosphate
  modified_base 10: mod_base = OTHER; note = 2'-O-methylguanosine-3'-phosphate
  modified_base 11: mod_base = OTHER; note = 2'-O-methyluridine-3'-phosphate
  modified_base 12: mod_base = OTHER; note = 2'-O-methyluridine-3'-phosphate
  modified_base 13: mod_base = OTHER; note = 2'-O-methyladenosine-3'-phosphate
  modified_base 14: mod_base = OTHER; note = 2'-deoxy-2'-fluorouridine-3'-phosphate
  modified_base 15: mod_base = OTHER; note = 2'-O-methyluridine-3'-phosphate
  modified_base 16: mod_base = OTHER; note = 2'-deoxy-2'-fluorouridine-3'-phosphate
  modified_base 17: mod_base = OTHER; note = 2'-O-methylcytidine-3'-phosphate
  modified_base 18: mod_base = OTHER; note = 2'-O-methylcytidine-3'-phosphate
  modified_base 19: mod_base = OTHER; note = 2'-O-methyladenosine-3'-phosphate
  modified_base 20: mod_base = OTHER; note = 2'-O-methylguanosine-3'-phosphate
  modified_base 21: mod_base = OTHER; note = 2'-O-methylcytidine-3'-phosphate
  modified_base 22: mod_base = OTHER; note = 2'-O-methyladenosine-3'-phosphate
  modified_base 23: mod_base = OTHER; note = 2'-O-methyluridine
ttactgccagttatttccagcat

SEQ ID NO: 5344 - RNA, 23 nt, synthetic construct
  source 1..23: mol_type = other RNA
  modified_base 1: mod_base = OTHER; note = 2'-O-methyluridine-3'-phosphate 5'phosphate
  modified_base 2: mod_base = OTHER; note = 2'-deoxy-2'-fluorouridine-3'-phosphate
  modified_base 3: mod_base = OTHER; note = 2'-O-methyluridine-3'-phosphate
  modified_base 4: mod_base = OTHER; note = 2'-O-methyladenosine-3'-phosphate
  modified_base 5: mod_base = OTHER; note = 2'-O-methylcytidine-3'-phosphate
  modified_base 6: mod_base = OTHER; note = 2'-deoxy-2'-fluorouridine-3'-phosphate
  modified_base 7: mod_base = OTHER; note = 2'-O-methylguanosine-3'-phosphate
  modified_base 8: mod_base = OTHER; note = 2'-O-methylcytidine-3'-phosphate
  modified_base 9: mod_base = OTHER; note = 2'-O-methylcytidine-3'-phosphate
  modified_base 10: mod_base = OTHER; note = 2'-O-methyladenosine-3'-phosphate
  modified_base 11: mod_base = OTHER; note = 2'-O-methylguanosine-3'-phosphate
  modified_base 12: mod_base = OTHER; note = 2'-O-methyluridine-3'-phosphate
  modified_base 13: mod_base = OTHER; note = 2'-O-methyluridine-3'-phosphate
  modified_base 14: mod_base = OTHER; note = 2'-deoxy-2'-fluoroadenosine-3'-phosphate
  modified_base 15: mod_base = OTHER; note = 2'-O-methyluridine-3'-phosphate
  modified_base 16: mod_base = OTHER; note = 2'-deoxy-2'-fluorouridine-3'-phosphate
  modified_base 17: mod_base = OTHER; note = 2'-O-methyluridine-3'-phosphate
  modified_base 18: mod_base = OTHER; note = 2'-O-methylcytidine-3'-phosphate
  modified_base 19: mod_base = OTHER; note = 2'-O-methylcytidine-3'-phosphate
  modified_base 20: mod_base = OTHER; note = 2'-O-methyladenosine-3'-phosphate
  modified_base 21: mod_base = OTHER; note = 2'-O-methylguanosine-3'-phosphate
  modified_base 22: mod_base = OTHER; note = 2'-O-methylcytidine-3'-phosphate
  modified_base 23: mod_base = OTHER; note = 2'-O-methyladenosine
tttactgccagttatttccagca

SEQ ID NO: 5345 - RNA, 23 nt, synthetic construct
  source 1..23: mol_type = other RNA
  modified_base 1: mod_base = OTHER; note = 2'-O-methyluridine-3'-phosphate 5'phosphate
  modified_base 2: mod_base = OTHER; note = 2'-deoxy-2'-fluoroadenosine-3'-phosphate
  modified_base 3: mod_base = OTHER; note = 2'-O-methyluridine-3'-phosphate
  modified_base 4: mod_base = OTHER; note = 2'-O-methyluridine-3'-phosphate
  modified_base 5: mod_base = OTHER; note = 2'-O-methyladenosine-3'-phosphate
  modified_base 6: mod_base = OTHER; note = 2'-deoxy-2'-fluorocytidine-3'-phosphate
  modified_base 7: mod_base = OTHER; note = 2'-O-methyluridine-3'-phosphate
  modified_base 8: mod_base = OTHER; note = 2'-O-methylguanosine-3'-phosphate
  modified_base 9: mod_base = OTHER; note = 2'-O-methylcytidine-3'-phosphate
  modified_base 10: mod_base = OTHER; note = 2'-O-methylcytidine-3'-phosphate
  modified_base 11: mod_base = OTHER; note = 2'-O-methyladenosine-3'-phosphate
  modified_base 12: mod_base = OTHER; note = 2'-O-methylguanosine-3'-phosphate
  modified_base 13: mod_base = OTHER; note = 2'-O-methyluridine-3'-phosphate
  modified_base 14: mod_base = OTHER; note = 2'-deoxy-2'-fluorouridine-3'-phosphate
  modified_base 15: mod_base = OTHER; note = 2'-O-methyladenosine-3'-phosphate
  modified_base 16: mod_base = OTHER; note = 2'-deoxy-2'-fluorouridine-3'-phosphate
  modified_base 17: mod_base = OTHER; note = 2'-O-methyluridine-3'-phosphate
  modified_base 18: mod_base = OTHER; note = 2'-O-methyluridine-3'-phosphate
  modified_base 19: mod_base = OTHER; note = 2'-O-methylcytidine-3'-phosphate
  modified_base 20: mod_base = OTHER; note = 2'-O-methylcytidine-3'-phosphate
  modified_base 21: mod_base = OTHER; note = 2'-O-methyladenosine-3'-phosphate
  modified_base 22: mod_base = OTHER; note = 2'-O-methylguanosine-3'-phosphate
  modified_base 23: mod_base = OTHER; note = 2'-O-methylcytidine
tattactgccagttatttccagc

SEQ ID NO: 5346 - RNA, 23 nt, synthetic construct
  source 1..23: mol_type = other RNA
  modified_base 1: mod_base = OTHER; note = 2'-O-methyluridine-3'-phosphate 5'phosphate
  modified_base 2: mod_base = OTHER; note = 2'-deoxy-2'-fluoroguanosine-3'-phosphate
  modified_base 3: mod_base = OTHER; note = 2'-O-methyladenosine-3'-phosphate
  modified_base 4: mod_base = OTHER; note = 2'-O-methyluridine-3'-phosphate
  modified_base 5: mod_base = OTHER; note = 2'-O-methyluridine-3'-phosphate
  modified_base 6: mod_base = OTHER; note = 2'-deoxy-2'-fluoroadenosine-3'-phosphate
  modified_base 7: mod_base = OTHER; note = 2'-O-methylcytidine-3'-phosphate
  modified_base 8: mod_base = OTHER; note = 2'-O-methyluridine-3'-phosphate
  modified_base 9: mod_base = OTHER; note = 2'-O-methylguanosine-3'-phosphate
  modified_base 10: mod_base = OTHER; note = 2'-O-methylcytidine-3'-phosphate
  modified_base 11: mod_base = OTHER; note = 2'-O-methylcytidine-3'-phosphate
  modified_base 12: mod_base = OTHER; note = 2'-O-methyladenosine-3'-phosphate
  modified_base 13: mod_base = OTHER; note = 2'-O-methylguanosine-3'-phosphate
  modified_base 14: mod_base = OTHER; note = 2'-deoxy-2'-fluorouridine-3'-phosphate
  modified_base 15: mod_base = OTHER; note = 2'-O-methyluridine-3'-phosphate
  modified_base 16: mod_base = OTHER; note = 2'-deoxy-2'-fluoroadenosine-3'-phosphate
  modified_base 17: mod_base = OTHER; note = 2'-O-methyluridine-3'-phosphate
  modified_base 18: mod_base = OTHER; note = 2'-O-methyluridine-3'-phosphate
  modified_base 19: mod_base = OTHER; note = 2'-O-methyluridine-3'-phosphate
  modified_base 20: mod_base = OTHER; note = 2'-O-methylcytidine-3'-phosphate
  modified_base 21: mod_base = OTHER; note = 2'-O-methylcytidine-3'-phosphate
  modified_base 22: mod_base = OTHER; note = 2'-O-methyladenosine-3'-phosphate
  modified_base 23: mod_base = OTHER; note = 2'-O-methylguanosine
tgattactgccagttatttccag

SEQ ID NO: 5347 - RNA, 23 nt, synthetic construct
  source 1..23: mol_type = other RNA
  modified_base 1: mod_base = OTHER; note = 2'-O-methyluridine-3'-phosphate 5'phosphate
  modified_base 2: mod_base = OTHER; note = 2'-deoxy-2'-fluorouridine-3'-phosphate
  modified_base 3: mod_base = OTHER; note = 2'-O-methylguanosine-3'-phosphate
  modified_base 4: mod_base = OTHER; note = 2'-O-methyladenosine-3'-phosphate
  modified_base 5: mod_base = OTHER; note = 2'-O-methyluridine-3'-phosphate
  modified_base 6: mod_base = OTHER; note = 2'-deoxy-2'-fluorouridine-3'-phosphate
  modified_base 7: mod_base = OTHER; note = 2'-O-methyladenosine-3'-phosphate
  modified_base 8: mod_base = OTHER; note = 2'-O-methylcytidine-3'-phosphate
  modified_base 9: mod_base = OTHER; note = 2'-O-methyluridine-3'-phosphate
  modified_base 10: mod_base = OTHER; note = 2'-O-methylguanosine-3'-phosphate
  modified_base 11: mod_base = OTHER; note = 2'-O-methylcytidine-3'-phosphate
  modified_base 12: mod_base = OTHER; note = 2'-O-methylcytidine-3'-phosphate
  modified_base 13: mod_base = OTHER; note = 2'-O-methyladenosine-3'-phosphate
  modified_base 14: mod_base = OTHER; note = 2'-deoxy-2'-fluoroguanosine-3'-phosphate
  modified_base 15: mod_base = OTHER; note = 2'-O-methyluridine-3'-phosphate
  modified_base 16: mod_base = OTHER; note = 2'-deoxy-2'-fluorouridine-3'-phosphate
  modified_base 17: mod_base = OTHER; note = 2'-O-methyladenosine-3'-phosphate
  modified_base 18: mod_base = OTHER; note = 2'-O-methyluridine-3'-phosphate
  modified_base 19: mod_base = OTHER; note = 2'-O-methyluridine-3'-phosphate
  modified_base 20: mod_base = OTHER; note = 2'-O-methyluridine-3'-phosphate
  modified_base 21: mod_base = OTHER; note = 2'-O-methylcytidine-3'-phosphate
  modified_base 22: mod_base = OTHER; note = 2'-O-methylcytidine-3'-phosphate
  modified_base 23: mod_base = OTHER; note = 2'-O-methyladenosine
ttgattactgccagttatttcca

SEQ ID NO: 5348 - RNA, 23 nt, synthetic construct
  source 1..23: mol_type = other RNA
  modified_base 1: mod_base = OTHER; note = 2'-O-methyluridine-3'-phosphate 5'phosphate
  modified_base 2: mod_base = OTHER; note = 2'-deoxy-2'-fluorouridine-3'-phosphate
  modified_base 3: mod_base = OTHER; note = 2'-O-methyluridine-3'-phosphate
  modified_base 4: mod_base = OTHER; note = 2'-O-methylguanosine-3'-phosphate
  modified_base 5: mod_base = OTHER; note = 2'-O-methyladenosine-3'-phosphate
  modified_base 6: mod_base = OTHER; note = 2'-deoxy-2'-fluorouridine-3'-phosphate
  modified_base 7: mod_base = OTHER; note = 2'-O-methyluridine-3'-phosphate
  modified_base 8: mod_base = OTHER; note = 2'-O-methyladenosine-3'-phosphate
  modified_base 9: mod_base = OTHER; note = 2'-O-methylcytidine-3'-phosphate
  modified_base 10: mod_base = OTHER; note = 2'-O-methyluridine-3'-phosphate
  modified_base 11: mod_base = OTHER; note = 2'-O-methylguanosine-3'-phosphate
  modified_base 12: mod_base = OTHER; note = 2'-O-methylcytidine-3'-phosphate
  modified_base 13: mod_base = OTHER; note = 2'-O-methylcytidine-3'-phosphate
  modified_base 14: mod_base = OTHER; note = 2'-deoxy-2'-fluoroadenosine-3'-phosphate
  modified_base 15: mod_base = OTHER; note = 2'-O-methylguanosine-3'-phosphate
  modified_base 16: mod_base = OTHER; note = 2'-deoxy-2'-fluorouridine-3'-phosphate
  modified_base 17: mod_base = OTHER; note = 2'-O-methyluridine-3'-phosphate
  modified_base 18: mod_base = OTHER; note = 2'-O-methyladenosine-3'-phosphate
  modified_base 19: mod_base = OTHER; note = 2'-O-methyluridine-3'-phosphate
  modified_base 20: mod_base = OTHER; note = 2'-O-methyluridine-3'-phosphate
  modified_base 21: mod_base = OTHER; note = 2'-O-methyluridine-3'-phosphate
  modified_base 22: mod_base = OTHER; note = 2'-O-methylcytidine-3'-phosphate
  modified_base 23: mod_base = OTHER; note = 2'-O-methylcytidine
tttgattactgccagttatttcc

SEQ ID NO: 5349 - RNA, 23 nt, synthetic construct
  source 1..23: mol_type = other RNA
  modified_base 1: mod_base = OTHER; note = 2'-O-methyluridine-3'-phosphate 5'phosphate
  modified_base 2: mod_base = OTHER; note = 2'-deoxy-2'-fluorouridine-3'-phosphate
  modified_base 3: mod_base = OTHER; note = 2'-O-methyluridine-3'-phosphate
  modified_base 4: mod_base = OTHER; note = 2'-O-methyluridine-3'-phosphate
  modified_base 5: mod_base = OTHER; note = 2'-O-methylguanosine-3'-phosphate
  modified_base 6: mod_base = OTHER; note = 2'-deoxy-2'-fluoroadenosine-3'-phosphate
  modified_base 7: mod_base = OTHER; note = 2'-O-methyluridine-3'-phosphate
  modified_base 8: mod_base = OTHER; note = 2'-O-methyluridine-3'-phosphate
  modified_base 9: mod_base = OTHER; note = 2'-O-methyladenosine-3'-phosphate
  modified_base 10: mod_base = OTHER; note = 2'-O-methylcytidine-3'-phosphate
  modified_base 11: mod_base = OTHER; note = 2'-O-methyluridine-3'-phosphate
  modified_base 12: mod_base = OTHER; note = 2'-O-methylguanosine-3'-phosphate
  modified_base 13: mod_base = OTHER; note = 2'-O-methylcytidine-3'-phosphate
  modified_base 14: mod_base = OTHER; note = 2'-deoxy-2'-fluorocytidine-3'-phosphate
  modified_base 15: mod_base = OTHER; note = 2'-O-methyladenosine-3'-phosphate
  modified_base 16: mod_base = OTHER; note = 2'-deoxy-2'-fluoroguanosine-3'-phosphate
  modified_base 17: mod_base = OTHER; note = 2'-O-methyluridine-3'-phosphate
  modified_base 18: mod_base = OTHER; note = 2'-O-methyluridine-3'-phosphate
  modified_base 19: mod_base = OTHER; note = 2'-O-methyladenosine-3'-phosphate
  modified_base 20: mod_base = OTHER; note = 2'-O-methyluridine-3'-phosphate
  modified_base 21: mod_base = OTHER; note = 2'-O-methyluridine-3'-phosphate
  modified_base 22: mod_base = OTHER; note = 2'-O-methyluridine-3'-phosphate
  modified_base 23: mod_base = OTHER; note = 2'-O-methylcytidine
ttttgattactgccagttatttc

SEQ ID NO: 5350 - RNA, 23 nt, synthetic construct
  source 1..23: mol_type = other RNA
  modified_base 1: mod_base = OTHER; note = 2'-O-methyluridine-3'-phosphate 5'phosphate
  modified_base 2: mod_base = OTHER; note = 2'-deoxy-2'-fluoroguanosine-3'-phosphate
  modified_base 3: mod_base = OTHER; note = 2'-O-methyluridine-3'-phosphate
  modified_base 4: mod_base = OTHER; note = 2'-O-methyluridine-3'-phosphate
  modified_base 5: mod_base = OTHER; note = 2'-O-methyluridine-3'-phosphate
  modified_base 6: mod_base = OTHER; note = 2'-deoxy-2'-fluoroguanosine-3'-phosphate
  modified_base 7: mod_base = OTHER; note = 2'-O-methyladenosine-3'-phosphate
  modified_base 8: mod_base = OTHER; note = 2'-O-methyluridine-3'-phosphate
  modified_base 9: mod_base = OTHER; note = 2'-O-methyluridine-3'-phosphate
  modified_base 10: mod_base = OTHER; note = 2'-O-methyladenosine-3'-phosphate
  modified_base 11: mod_base = OTHER; note = 2'-O-methylcytidine-3'-phosphate
  modified_base 12: mod_base = OTHER; note = 2'-O-methyluridine-3'-phosphate
  modified_base 13: mod_base = OTHER; note = 2'-O-methylguanosine-3'-phosphate
  modified_base 14: mod_base = OTHER; note = 2'-deoxy-2'-fluorocytidine-3'-phosphate
  modified_base 15: mod_base = OTHER; note = 2'-O-methylcytidine-3'-phosphate
  modified_base 16: mod_base = OTHER; note = 2'-deoxy-2'-fluoroadenosine-3'-phosphate
  modified_base 17: mod_base = OTHER; note = 2'-O-methylguanosine-3'-phosphate
  modified_base 18: mod_base = OTHER; note = 2'-O-methyluridine-3'-phosphate
  modified_base 19: mod_base = OTHER; note = 2'-O-methyluridine-3'-phosphate
  modified_base 20: mod_base = OTHER; note = 2'-O-methyladenosine-3'-phosphate
  modified_base 21: mod_base = OTHER; note = 2'-O-methyluridine-3'-phosphate
  modified_base 22: mod_base = OTHER; note = 2'-O-methyluridine-3'-phosphate
  modified_base 23: mod_base = OTHER; note = 2'-O-methyluridine
tgtttgattactgccagttattt

SEQ ID NO: 5351 - RNA, 23 nt, synthetic construct
  source 1..23: mol_type = other RNA
  modified_base 1: mod_base = OTHER; note = 2'-O-methyluridine-3'-phosphate 5'phosphate
  modified_base 2: mod_base = OTHER; note = 2'-deoxy-2'-fluorouridine-3'-phosphate
  modified_base 3: mod_base = OTHER; note = 2'-O-methylcytidine-3'-phosphate
  modified_base 4: mod_base = OTHER; note = 2'-O-methylguanosine-3'-phosphate
  modified_base 5: mod_base = OTHER; note = 2'-O-methyluridine-3'-phosphate
  modified_base 6: mod_base = OTHER; note = 2'-deoxy-2'-fluorouridine-3'-phosphate
  modified_base 7: mod_base = OTHER; note = 2'-O-methyluridine-3'-phosphate
  modified_base 8: mod_base = OTHER; note = 2'-O-methylguanosine-3'-phosphate
  modified_base 9: mod_base = OTHER; note = 2'-O-methyladenosine-3'-phosphate
  modified_base 10: mod_base = OTHER; note = 2'-O-methyluridine-3'-phosphate
  modified_base 11: mod_base = OTHER; note = 2'-O-methyluridine-3'-phosphate
  modified_base 12: mod_base = OTHER; note = 2'-O-methyladenosine-3'-phosphate
  modified_base 13: mod_base = OTHER; note = 2'-O-methylcytidine-3'-phosphate
  modified_base 14: mod_base = OTHER; note = 2'-deoxy-2'-fluorouridine-3'-phosphate
  modified_base 15: mod_base = OTHER; note = 2'-O-methylguanosine-3'-phosphate
  modified_base 16: mod_base = OTHER; note = 2'-deoxy-2'-fluorocytidine-3'-phosphate
  modified_base 17: mod_base = OTHER; note = 2'-O-methylcytidine-3'-phosphate
  modified_base 18: mod_base = OTHER; note = 2'-O-methyladenosine-3'-phosphate
  modified_base 19: mod_base = OTHER; note = 2'-O-methylguanosine-3'-phosphate
  modified_base 20: mod_base = OTHER; note = 2'-O-methyluridine-3'-phosphate
  modified_base 21: mod_base = OTHER; note = 2'-O-methyluridine-3'-phosphate
  modified_base 22: mod_base = OTHER; note = 2'-O-methyladenosine-3'-phosphate
  modified_base 23: mod_base = OTHER; note = 2'-O-methyluridine
ttcgtttgattactgccagttat

SEQ ID NO: 5352 - RNA, 23 nt, synthetic construct
  source 1..23: mol_type = other RNA
  modified_base 1: mod_base = OTHER; note = 2'-O-methyluridine-3'-phosphate 5'phosphate
  modified_base 2: mod_base = OTHER; note = 2'-deoxy-2'-fluorouridine-3'-phosphate
  modified_base 3: mod_base = OTHER; note = 2'-O-methyluridine-3'-phosphate
  modified_base 4: mod_base = OTHER; note = 2'-O-methylcytidine-3'-phosphate
  modified_base 5: mod_base = OTHER; note = 2'-O-methylguanosine-3'-phosphate
  modified_base 6: mod_base = OTHER; note = 2'-deoxy-2'-fluorouridine-3'-phosphate
  modified_base 7: mod_base = OTHER; note = 2'-O-methyluridine-3'-phosphate
  modified_base 8: mod_base = OTHER; note = 2'-O-methyluridine-3'-phosphate
  modified_base 9: mod_base = OTHER; note = 2'-O-methylguanosine-3'-phosphate
  modified_base 10: mod_base = OTHER; note = 2'-O-methyladenosine-3'-phosphate
  modified_base 11: mod_base = OTHER; note = 2'-O-methyluridine-3'-phosphate
  modified_base 12: mod_base = OTHER; note = 2'-O-methyluridine-3'-phosphate
  modified_base 13: mod_base = OTHER; note = 2'-O-methyladenosine-3'-phosphate
  modified_base 14: mod_base = OTHER; note = 2'-deoxy-2'-fluorocytidine-3'-phosphate
  modified_base 15: mod_base = OTHER; note = 2'-O-methyluridine-3'-phosphate
  modified_base 16: mod_base = OTHER; note = 2'-deoxy-2'-fluoroguanosine-3'-phosphate
  modified_base 17: mod_base = OTHER; note = 2'-O-methylcytidine-3'-phosphate
  modified_base 18: mod_base = OTHER; note = 2'-O-methylcytidine-3'-phosphate
  modified_base 19: mod_base = OTHER; note = 2'-O-methyladenosine-3'-phosphate
  modified_base 20: mod_base = OTHER; note = 2'-O-methylguanosine-3'-phosphate
  modified_base 21: mod_base = OTHER; note = 2'-O-methyluridine-3'-phosphate
  modified_base 22: mod_base = OTHER; note = 2'-O-methyluridine-3'-phosphate
  modified_base 23: mod_base = OTHER; note = 2'-O-methyladenosine
tttcgtttgattactgccagtta

SEQ ID NO: 5353 - RNA, 23 nt, synthetic construct
  source 1..23: mol_type = other RNA
  modified_base 1: mod_base = OTHER; note = 2'-O-methyluridine-3'-phosphate 5'phosphate
  modified_base 2: mod_base = OTHER; note = 2'-deoxy-2'-fluorocytidine-3'-phosphate
  modified_base 3: mod_base = OTHER; note = 2'-O-methyluridine-3'-phosphate
  modified_base 4: mod_base = OTHER; note = 2'-O-methyluridine-3'-phosphate
  modified_base 5: mod_base = OTHER; note = 2'-O-methylcytidine-3'-phosphate
  modified_base 6: mod_base = OTHER; note = 2'-deoxy-2'-fluoroguanosine-3'-phosphate
  modified_base 7: mod_base = OTHER; note = 2'-O-methyluridine-3'-phosphate
  modified_base 8: mod_base = OTHER; note = 2'-O-methyluridine-3'-phosphate
  modified_base 9: mod_base = OTHER; note = 2'-O-methyluridine-3'-phosphate
  modified_base 10: mod_base = OTHER; note = 2'-O-methylguanosine-3'-phosphate
  modified_base 11: mod_base = OTHER; note = 2'-O-methyladenosine-3'-phosphate
  modified_base 12: mod_base = OTHER; note = 2'-O-methyluridine-3'-phosphate
  modified_base 13: mod_base = OTHER; note = 2'-O-methyluridine-3'-phosphate
  modified_base 14: mod_base = OTHER; note = 2'-deoxy-2'-fluoroadenosine-3'-phosphate
  modified_base 15: mod_base = OTHER; note = 2'-O-methylcytidine-3'-phosphate
  modified_base 16: mod_base = OTHER; note = 2'-deoxy-2'-fluorouridine-3'-phosphate
  modified_base 17: mod_base = OTHER; note = 2'-O-methylguanosine-3'-phosphate
  modified_base 18: mod_base = OTHER; note = 2'-O-methylcytidine-3'-phosphate
  modified_base 19: mod_base = OTHER; note = 2'-O-methylcytidine-3'-phosphate
  modified_base 20: mod_base = OTHER; note = 2'-O-methyladenosine-3'-phosphate
  modified_base 21: mod_base = OTHER; note = 2'-O-methylguanosine-3'-phosphate
  modified_base 22: mod_base = OTHER; note = 2'-O-methyluridine-3'-phosphate
  modified_base 23: mod_base = OTHER; note = 2'-O-methyluridine
tcttcgtttgattactgccagtt

SEQ ID NO: 5354 - RNA, 23 nt, synthetic construct
  source 1..23: mol_type = other RNA
  modified_base 1: mod_base = OTHER; note = 2'-O-methyluridine-3'-phosphate 5'phosphate
  modified_base 2: mod_base = OTHER; note = 2'-deoxy-2'-fluorouridine-3'-phosphate
  modified_base 3: mod_base = OTHER; note = 2'-O-methylcytidine-3'-phosphate
  modified_base 4: mod_base = OTHER; note = 2'-O-methyluridine-3'-phosphate
  modified_base 5: mod_base = OTHER; note = 2'-O-methyluridine-3'-phosphate
  modified_base 6: mod_base = OTHER; note = 2'-deoxy-2'-fluorocytidine-3'-phosphate
  modified_base 7: mod_base = OTHER; note = 2'-O-methylguanosine-3'-phosphate
  modified_base 8: mod_base = OTHER; note = 2'-O-methyluridine-3'-phosphate
  modified_base 9: mod_base = OTHER; note = 2'-O-methyluridine-3'-phosphate
  modified_base 10: mod_base = OTHER; note = 2'-O-methyluridine-3'-phosphate
  modified_base 11: mod_base = OTHER; note = 2'-O-methylguanosine-3'-phosphate
  modified_base 12: mod_base = OTHER; note = 2'-O-methyladenosine-3'-phosphate
  modified_base 13: mod_base = OTHER; note = 2'-O-methyluridine-3'-phosphate
  modified_base 14: mod_base = OTHER; note = 2'-deoxy-2'-fluorouridine-3'-phosphate
  modified_base 15: mod_base = OTHER; note = 2'-O-methyladenosine-3'-phosphate
  modified_base 16: mod_base = OTHER; note = 2'-deoxy-2'-fluorocytidine-3'-phosphate
  modified_base 17: mod_base = OTHER; note = 2'-O-methyluridine-3'-phosphate
  modified_base 18: mod_base = OTHER; note = 2'-O-methylguanosine-3'-phosphate
  modified_base 19: mod_base = OTHER; note = 2'-O-methylcytidine-3'-phosphate
  modified_base 20: mod_base = OTHER; note = 2'-O-methylcytidine-3'-phosphate
  modified_base 21: mod_base = OTHER; note = 2'-O-methyladenosine-3'-phosphate
  modified_base 22: mod_base = OTHER; note = 2'-O-methylguanosine-3'-phosphate
  modified_base 23: mod_base = OTHER; note = 2'-O-methyluridine
ttcttcgtttgattactgccagt

SEQ ID NO: 5355 - RNA, 23 nt, synthetic construct
  source 1..23: mol_type = other RNA
  modified_base 1: mod_base = OTHER; note = 2'-O-methyluridine-3'-phosphate 5'phosphate
  modified_base 2: mod_base = OTHER; note = 2'-deoxy-2'-fluoroguanosine-3'-phosphate
  modified_base 3: mod_base = OTHER; note = 2'-O-methyluridine-3'-phosphate
  modified_base 4: mod_base = OTHER; note = 2'-O-methylcytidine-3'-phosphate
  modified_base 5: mod_base = OTHER; note = 2'-O-methyluridine-3'-phosphate
  modified_base 6: mod_base = OTHER; note = 2'-deoxy-2'-fluorouridine-3'-phosphate
  modified_base 7: mod_base = OTHER; note = 2'-O-methylcytidine-3'-phosphate
  modified_base 8: mod_base = OTHER; note = 2'-O-methylguanosine-3'-phosphate
  modified_base 9: mod_base = OTHER; note = 2'-O-methyluridine-3'-phosphate
  modified_base 10: mod_base = OTHER; note = 2'-O-methyluridine-3'-phosphate
  modified_base 11: mod_base = OTHER; note = 2'-O-methyluridine-3'-phosphate
  modified_base 12: mod_base = OTHER; note = 2'-O-methylguanosine-3'-phosphate
  modified_base 13: mod_base = OTHER; note = 2'-O-methyladenosine-3'-phosphate
  modified_base 14: mod_base = OTHER; note = 2'-deoxy-2'-fluorouridine-3'-phosphate
  modified_base 15: mod_base = OTHER; note = 2'-O-methyluridine-3'-phosphate
  modified_base 16: mod_base = OTHER; note = 2'-deoxy-2'-fluoroadenosine-3'-phosphate
  modified_base 17: mod_base = OTHER; note = 2'-O-methylcytidine-3'-phosphate
  modified_base 18: mod_base = OTHER; note = 2'-O-methyluridine-3'-phosphate
  modified_base 19: mod_base = OTHER; note = 2'-O-methylguanosine-3'-phosphate
  modified_base 20: mod_base = OTHER; note = 2'-O-methylcytidine-3'-phosphate
  modified_base 21: mod_base = OTHER; note = 2'-O-methylcytidine-3'-phosphate
  modified_base 22: mod_base = OTHER; note = 2'-O-methyladenosine-3'-phosphate
  modified_base 23: mod_base = OTHER; note = 2'-O-methylguanosine
tgtcttcgtttgattactgccag

SEQ ID NO: 5356 - RNA, 23 nt, synthetic construct
  source 1..23: mol_type = other RNA
  modified_base 1: mod_base = OTHER; note = 2'-O-methyluridine-3'-phosphate 5'phosphate
  modified_base 2: mod_base = OTHER; note = 2'-deoxy-2'-fluorouridine-3'-phosphate
  modified_base 3: mod_base = OTHER; note = 2'-O-methylguanosine-3'-phosphate
  modified_base 4: mod_base = OTHER; note = 2'-O-methyluridine-3'-phosphate
  modified_base 5: mod_base = OTHER; note = 2'-O-methylcytidine-3'-phosphate
  modified_base 6: mod_base = OTHER; note = 2'-deoxy-2'-fluorouridine-3'-phosphate
  modified_base 7: mod_base = OTHER; note = 2'-O-methyluridine-3'-phosphate
  modified_base 8: mod_base = OTHER; note = 2'-O-methylcytidine-3'-phosphate
  modified_base 9: mod_base = OTHER; note = 2'-O-methylguanosine-3'-phosphate
  modified_base 10: mod_base = OTHER; note = 2'-O-methyluridine-3'-phosphate
  modified_base 11: mod_base = OTHER; note = 2'-O-methyluridine-3'-phosphate
  modified_base 12: mod_base = OTHER; note = 2'-O-methyluridine-3'-phosphate
  modified_base 13: mod_base = OTHER; note = 2'-O-methylguanosine-3'-phosphate
  modified_base 14: mod_base = OTHER; note = 2'-deoxy-2'-fluoroadenosine-3'-phosphate
  modified_base 15: mod_base = OTHER; note = 2'-O-methyluridine-3'-phosphate
  modified_base 16: mod_base = OTHER; note = 2'-deoxy-2'-fluorouridine-3'-phosphate
  modified_base 17: mod_base = OTHER; note = 2'-O-methyladenosine-3'-phosphate
  modified_base 18: mod_base = OTHER; note = 2'-O-methylcytidine-3'-phosphate
  modified_base 19: mod_base = OTHER; note = 2'-O-methyluridine-3'-phosphate
  modified_base 20: mod_base = OTHER; note = 2'-O-methylguanosine-3'-phosphate
  modified_base 21: mod_base = OTHER; note = 2'-O-methylcytidine-3'-phosphate
  modified_base 22: mod_base = OTHER; note = 2'-O-methylcytidine-3'-phosphate
  modified_base 23: mod_base = OTHER; note = 2'-O-methyladenosine
ttgtcttcgtttgattactgcca

SEQ ID NO: 5357 - RNA, 23 nt, synthetic construct
  source 1..23: mol_type = other RNA
  modified_base 1: mod_base = OTHER; note = 2'-O-methyluridine-3'-phosphate 5'phosphate
  modified_base 2: mod_base = OTHER; note = 2'-deoxy-2'-fluoroadenosine-3'-phosphate
  modified_base 3: mod_base = OTHER; note = 2'-O-methylguanosine-3'-phosphate
  modified_base 4: mod_base = OTHER; note = 2'-O-methyluridine-3'-phosphate
  modified_base 5: mod_base = OTHER; note = 2'-O-methylguanosine-3'-phosphate
  modified_base 6: mod_base = OTHER; note = 2'-deoxy-2'-fluorouridine-3'-phosphate
  modified_base 7: mod_base = OTHER; note = 2'-O-methylcytidine-3'-phosphate
  modified_base 8: mod_base = OTHER; note = 2'-O-methyluridine-3'-phosphate
  modified_base 9: mod_base = OTHER; note = 2'-O-methyluridine-3'-phosphate
  modified_base 10: mod_base = OTHER; note = 2'-O-methylcytidine-3'-phosphate
  modified_base 11: mod_base = OTHER; note = 2'-O-methylguanosine-3'-phosphate
  modified_base 12: mod_base = OTHER; note = 2'-O-methyluridine-3'-phosphate
  modified_base 13: mod_base = OTHER; note = 2'-O-methyluridine-3'-phosphate
  modified_base 14: mod_base = OTHER; note = 2'-deoxy-2'-fluorouridine-3'-phosphate
  modified_base 15: mod_base = OTHER; note = 2'-O-methylguanosine-3'-phosphate
  modified_base 16: mod_base = OTHER; note = 2'-deoxy-2'-fluoroadenosine-3'-phosphate
  modified_base 17: mod_base = OTHER; note = 2'-O-methyluridine-3'-phosphate
  modified_base 18: mod_base = OTHER; note = 2'-O-methyluridine-3'-phosphate
  modified_base 19: mod_base = OTHER; note = 2'-O-methyladenosine-3'-phosphate
  modified_base 20: mod_base = OTHER; note = 2'-O-methylcytidine-3'-phosphate
  modified_base 21: mod_base = OTHER; note = 2'-O-methyluridine-3'-phosphate
  modified_base 22: mod_base = OTHER; note = 2'-O-methylguanosine-3'-phosphate
  modified_base 23: mod_base = OTHER; note = 2'-O-methylcytidine
tagtgtcttcgtttgattactgc

SEQ ID NO: 5358 - RNA, 23 nt, synthetic construct
  source 1..23: mol_type = other RNA
  modified_base 1: mod_base = OTHER; note = 2'-O-methyluridine-3'-phosphate 5'phosphate
  modified_base 2: mod_base = OTHER; note = 2'-deoxy-2'-fluoroguanosine-3'-phosphate
  modified_base 3: mod_base = OTHER; note = 2'-O-methyladenosine-3'-phosphate
  modified_base 4: mod_base = OTHER; note = 2'-O-methylcytidine-3'-phosphate
  modified_base 5: mod_base = OTHER; note = 2'-O-methyladenosine-3'-phosphate
  modified_base 6: mod_base = OTHER; note = 2'-deoxy-2'-fluoroguanosine-3'-phosphate
  modified_base 7: mod_base = OTHER; note = 2'-O-methyluridine-3'-phosphate
  modified_base 8: mod_base = OTHER; note = 2'-O-methylguanosine-3'-phosphate
  modified_base 9: mod_base = OTHER; note = 2'-O-methyluridine-3'-phosphate
  modified_base 10: mod_base = OTHER; note = 2'-O-methylcytidine-3'-phosphate
  modified_base 11: mod_base = OTHER; note = 2'-O-methyluridine-3'-phosphate
  modified_base 12: mod_base = OTHER; note = 2'-O-methyluridine-3'-phosphate
  modified_base 13: mod_base = OTHER; note = 2'-O-methylcytidine-3'-phosphate
  modified_base 14: mod_base = OTHER; note = 2'-deoxy-2'-fluoroguanosine-3'-phosphate
  modified_base 15: mod_base = OTHER; note = 2'-O-methyluridine-3'-phosphate
  modified_base 16: mod_base = OTHER; note = 2'-deoxy-2'-fluorouridine-3'-phosphate
  modified_base 17: mod_base = OTHER; note = 2'-O-methyluridine-3'-phosphate
  modified_base 18: mod_base = OTHER; note = 2'-O-methylguanosine-3'-phosphate
  modified_base 19: mod_base = OTHER; note = 2'-O-methyladenosine-3'-phosphate
  modified_base 20: mod_base = OTHER; note = 2'-O-methyluridine-3'-phosphate
  modified_base 21: mod_base = OTHER; note = 2'-O-methyluridine-3'-phosphate
  modified_base 22: mod_base = OTHER; note = 2'-O-methyladenosine-3'-phosphate
  modified_base 23: mod_base = OTHER; note = 2'-O-methylcytidine
tgacagtgtcttcgtttgattac

SEQ ID NO: 5359 - RNA, 23 nt, synthetic construct
  source 1..23: mol_type = other RNA
  modified_base 1: mod_base = OTHER; note = 2'-O-methyluridine-3'-phosphate 5'phosphate
  modified_base 2: mod_base = OTHER; note = 2'-deoxy-2'-fluoroguanosine-3'-phosphate
  modified_base 3: mod_base = OTHER; note = 2'-O-methylguanosine-3'-phosphate
  modified_base 4: mod_base = OTHER; note = 2'-O-methyladenosine-3'-phosphate
  modified_base 5: mod_base = OTHER; note = 2'-O-methylcytidine-3'-phosphate
  modified_base 6: mod_base = OTHER; note = 2'-deoxy-2'-fluoroadenosine-3'-phosphate
  modified_base 7: mod_base = OTHER; note = 2'-O-methylguanosine-3'-phosphate
  modified_base 8: mod_base = OTHER; note = 2'-O-methyluridine-3'-phosphate
  modified_base 9: mod_base = OTHER; note = 2'-O-methylguanosine-3'-phosphate
  modified_base 10: mod_base = OTHER; note = 2'-O-methyluridine-3'-phosphate
  modified_base 11: mod_base = OTHER; note = 2'-O-methylcytidine-3'-phosphate
  modified_base 12: mod_base = OTHER; note = 2'-O-methyluridine-3'-phosphate
  modified_base 13: mod_base = OTHER; note = 2'-O-methyluridine-3'-phosphate
  modified_base 14: mod_base = OTHER; note = 2'-deoxy-2'-fluorocytidine-3'-phosphate
  modified_base 15: mod_base = OTHER; note = 2'-O-methylguanosine-3'-phosphate
  modified_base 16: mod_base = OTHER; note = 2'-deoxy-2'-fluorouridine-3'-phosphate
  modified_base 17: mod_base = OTHER; note = 2'-O-methyluridine-3'-phosphate
  modified_base 18: mod_base = OTHER; note = 2'-O-methyluridine-3'-phosphate
  modified_base 19: mod_base = OTHER; note = 2'-O-methylguanosine-3'-phosphate
  modified_base 20: mod_base = OTHER; note = 2'-O-methyladenosine-3'-phosphate
  modified_base 21: mod_base = OTHER; note = 2'-O-methyluridine-3'-phosphate
  modified_base 22: mod_base = OTHER; note = 2'-O-methyluridine-3'-phosphate
  modified_base 23: mod_base = OTHER; note = 2'-O-methyladenosine
tggacagtgtcttcgtttgatta

SEQ ID NO: 5360 - RNA, 23 nt, synthetic construct
  source 1..23: mol_type = other RNA
  modified_base 1: mod_base = OTHER; note = 2'-O-methyluridine-3'-phosphate 5'phosphate
  modified_base 2: mod_base = OTHER; note = 2'-deoxy-2'-fluoroadenosine-3'-phosphate
  modified_base 3: mod_base = OTHER; note = 2'-O-methyladenosine-3'-phosphate
  modified_base 4: mod_base = OTHER; note = 2'-O-methyladenosine-3'-phosphate
  modified_base 5: mod_base = OTHER; note = 2'-O-methyladenosine-3'-phosphate
  modified_base 6: mod_base = OTHER; note = 2'-deoxy-2'-fluorouridine-3'-phosphate
  modified_base 7: mod_base = OTHER; note = 2'-O-methylguanosine-3'-phosphate
  modified_base 8: mod_base = OTHER; note = 2'-O-methylcytidine-3'-phosphate
  modified_base 9: mod_base = OTHER; note = 2'-O-methylcytidine-3'-phosphate
  modified_base 10: mod_base = OTHER; note = 2'-O-methylguanosine-3'-phosphate
  modified_base 11: mod_base = OTHER; note = 2'-O-methyladenosine-3'-phosphate
  modified_base 12: mod_base = OTHER; note = 2'-O-methylguanosine-3'-phosphate
  modified_base 13: mod_base = OTHER; note = 2'-O-methylguanosine-3'-phosphate
  modified_base 14: mod_base = OTHER; note = 2'-deoxy-2'-fluorouridine-3'-phosphate
  modified_base 15: mod_base = OTHER; note = 2'-O-methyluridine-3'-phosphate
  modified_base 16: mod_base = OTHER; note = 2'-deoxy-2'-fluorouridine-3'-phosphate
  modified_base 17: mod_base = OTHER; note = 2'-O-methylguanosine-3'-phosphate
  modified_base 18: mod_base = OTHER; note = 2'-O-methylguanosine-3'-phosphate
  modified_base 19: mod_base = OTHER; note = 2'-O-methylcytidine-3'-phosphate
  modified_base 20: mod_base = OTHER; note = 2'-O-methylguanosine-3'-phosphate
  modified_base 21: mod_base = OTHER; note = 2'-O-methyluridine-3'-phosphate
  modified_base 22: mod_base = OTHER; note = 2'-O-methyladenosine-3'-phosphate
  modified_base 23: mod_base = OTHER; note = 2'-O-methylguanosine
taaaatgccgaggtttggcgtag

SEQ ID NO: 5361 - RNA, 23 nt, synthetic construct
  source 1..23: mol_type = other RNA
  modified_base 1: mod_base = OTHER; note = 2'-O-methyluridine-3'-phosphate 5'phosphate
  modified_base 2: mod_base = OTHER; note = 2'-deoxy-2'-fluoroadenosine-3'-phosphate
  modified_base 3: mod_base = OTHER; note = 2'-O-methyladenosine-3'-phosphate
  modified_base 4: mod_base = OTHER; note = 2'-O-methyladenosine-3'-phosphate
  modified_base 5: mod_base = OTHER; note = 2'-O-methyladenosine-3'-phosphate
  modified_base 6: mod_base = OTHER; note = 2'-deoxy-2'-fluoroadenosine-3'-phosphate
  modified_base 7: mod_base = OTHER; note = 2'-O-methyluridine-3'-phosphate
  modified_base 8: mod_base = OTHER; note = 2'-O-methylguanosine-3'-phosphate
  modified_base 9: mod_base = OTHER; note = 2'-O-methylcytidine-3'-phosphate
  modified_base 10: mod_base = OTHER; note = 2'-O-methylcytidine-3'-phosphate
  modified_base 11: mod_base = OTHER; note = 2'-O-methylguanosine-3'-phosphate
  modified_base 12: mod_base = OTHER; note = 2'-O-methyladenosine-3'-phosphate
  modified_base 13: mod_base = OTHER; note = 2'-O-methylguanosine-3'-phosphate
  modified_base 14: mod_base = OTHER; note = 2'-deoxy-2'-fluoroguanosine-3'-phosphate
  modified_base 15: mod_base = OTHER; note = 2'-O-methyluridine-3'-phosphate
  modified_base 16: mod_base = OTHER; note = 2'-deoxy-2'-fluorouridine-3'-phosphate
  modified_base 17: mod_base = OTHER; note = 2'-O-methyluridine-3'-phosphate
  modified_base 18: mod_base = OTHER; note = 2'-O-methylguanosine-3'-phosphate
  modified_base 19: mod_base = OTHER; note = 2'-O-methylguanosine-3'-phosphate
  modified_base 20: mod_base = OTHER; note = 2'-O-methylcytidine-3'-phosphate
  modified_base 21: mod_base = OTHER; note = 2'-O-methylguanosine-3'-phosphate
  modified_base 22: mod_base = OTHER; note = 2'-O-methyluridine-3'-phosphate
  modified_base 23: mod_base = OTHER; note = 2'-O-methyladenosine
taaaaatgccgaggtttggcgta

SEQ ID NO: 5362 - RNA, 23 nt, synthetic construct
  source 1..23: mol_type = other RNA
  modified_base 1: mod_base = OTHER; note = 2'-O-methyluridine-3'-phosphate 5'phosphate
  modified_base 2: mod_base = OTHER; note = 2'-deoxy-2'-fluoroadenosine-3'-phosphate
  modified_base 3: mod_base = OTHER; note = 2'-O-methyladenosine-3'-phosphate
  modified_base 4: mod_base = OTHER; note = 2'-O-methyladenosine-3'-phosphate
  modified_base 5: mod_base = OTHER; note = 2'-O-methyladenosine-3'-phosphate
  modified_base 6: mod_base = OTHER; note = 2'-deoxy-2'-fluoroadenosine-3'-phosphate
  modified_base 7: mod_base = OTHER; note = 2'-O-methyladenosine-3'-phosphate
  modified_base 8: mod_base = OTHER; note = 2'-O-methyluridine-3'-phosphate
  modified_base 9: mod_base = OTHER; note = 2'-O-methylguanosine-3'-phosphate
  modified_base 10: mod_base = OTHER; note = 2'-O-methylcytidine-3'-phosphate
  modified_base 11: mod_base = OTHER; note = 2'-O-methylcytidine-3'-phosphate
  modified_base 12: mod_base = OTHER; note = 2'-O-methylguanosine-3'-phosphate
  modified_base 13: mod_base = OTHER; note = 2'-O-methyladenosine-3'-phosphate
  modified_base 14: mod_base = OTHER; note = 2'-deoxy-2'-fluoroguanosine-3'-phosphate
  modified_base 15: mod_base = OTHER; note = 2'-O-methylguanosine-3'-phosphate
  modified_base 16: mod_base = OTHER; note = 2'-deoxy-2'-fluorouridine-3'-phosphate
  modified_base 17: mod_base = OTHER; note = 2'-O-methyluridine-3'-phosphate
  modified_base 18: mod_base = OTHER; note = 2'-O-methyluridine-3'-phosphate
  modified_base 19: mod_base = OTHER; note = 2'-O-methylguanosine-3'-phosphate
  modified_base 20: mod_base = OTHER; note = 2'-O-methylguanosine-3'-phosphate
  modified_base 21: mod_base = OTHER; note = 2'-O-methylcytidine-3'-phosphate
  modified_base 22: mod_base = OTHER; note = 2'-O-methylguanosine-3'-phosphate
  modified_base 23: mod_base = OTHER; note = 2'-O-methyluridine
taaaaaatgccgaggtttggcgt

SEQ ID NO: 5363 - RNA, 23 nt, synthetic construct
  source 1..23: mol_type = other RNA
  modified_base 1: mod_base = OTHER; note = 2'-O-methyluridine-3'-phosphate 5'phosphate
  modified_base 2: mod_base = OTHER; note = 2'-deoxy-2'-fluorocytidine-3'-phosphate
  modified_base 3: mod_base = OTHER; note = 2'-O-methyladenosine-3'-phosphate
  modified_base 4: mod_base = OTHER; note = 2'-O-methyladenosine-3'-phosphate
  modified_base 5: mod_base = OTHER; note = 2'-O-methyladenosine-3'-phosphate
  modified_base 6: mod_base = OTHER; note = 2'-deoxy-2'-fluoroadenosine-3'-phosphate
  modified_base 7: mod_base = OTHER; note = 2'-O-methyladenosine-3'-phosphate
  modified_base 8: mod_base = OTHER; note = 2'-O-methyladenosine-3'-phosphate
  modified_base 9: mod_base = OTHER; note = 2'-O-methyluridine-3'-phosphate
  modified_base 10: mod_base = OTHER; note = 2'-O-methylguanosine-3'-phosphate
  modified_base 11: mod_base = OTHER; note = 2'-O-methylcytidine-3'-phosphate
  modified_base 12: mod_base = OTHER; note = 2'-O-methylcytidine-3'-phosphate
  modified_base 13: mod_base = OTHER; note = 2'-O-methylguanosine-3'-phosphate
  modified_base 14: mod_base = OTHER; note = 2'-deoxy-2'-fluoroadenosine-3'-phosphate
  modified_base 15: mod_base = OTHER; note = 2'-O-methylguanosine-3'-phosphate
  modified_base 16: mod_base = OTHER; note = 2'-deoxy-2'-fluoroguanosine-3'-phosphate
  modified_base 17: mod_base = OTHER; note = 2'-O-methyluridine-3'-phosphate
  modified_base 18: mod_base = OTHER; note = 2'-O-methyluridine-3'-phosphate
  modified_base 19: mod_base = OTHER; note = 2'-O-methyluridine-3'-phosphate
  modified_base 20: mod_base = OTHER; note = 2'-O-methylguanosine-3'-phosphate
  modified_base 21: mod_base = OTHER; note = 2'-O-methylguanosine-3'-phosphate
  modified_base 22: mod_base = OTHER; note = 2'-O-methylcytidine-3'-phosphate
  modified_base 23: mod_base = OTHER; note = 2'-O-methylguanosine
tcaaaaaatgccgaggtttggcg

SEQ ID NO: 5364 - RNA, 23 nt, synthetic construct
  source 1..23: mol_type = other RNA
  modified_base 1: mod_base = OTHER; note = 2'-O-methyluridine-3'-phosphate 5'phosphate
  modified_base 2: mod_base = OTHER; note = 2'-deoxy-2'-fluoroadenosine-3'-phosphate
  modified_base 3: mod_base = OTHER; note = 2'-O-methylcytidine-3'-phosphate
  modified_base 4: mod_base = OTHER; note = 2'-O-methyladenosine-3'-phosphate
  modified_base 5: mod_base = OTHER; note = 2'-O-methyladenosine-3'-phosphate
  modified_base 6: mod_base = OTHER; note = 2'-deoxy-2'-fluoroadenosine-3'-phosphate
  modified_base 7: mod_base = OTHER; note = 2'-O-methyladenosine-3'-phosphate
  modified_base 8: mod_base = OTHER; note = 2'-O-methyladenosine-3'-phosphate
  modified_base 9: mod_base = OTHER; note = 2'-O-methyladenosine-3'-phosphate
  modified_base 10: mod_base = OTHER; note = 2'-O-methyluridine-3'-phosphate
  modified_base 11: mod_base = OTHER; note = 2'-O-methylguanosine-3'-phosphate
  modified_base 12: mod_base = OTHER; note = 2'-O-methylcytidine-3'-phosphate
  modified_base 13: mod_base = OTHER; note = 2'-O-methylcytidine-3'-phosphate
  modified_base 14: mod_base = OTHER; note = 2'-deoxy-2'-fluoroguanosine-3'-phosphate
  modified_base 15: mod_base = OTHER; note = 2'-O-methyladenosine-3'-phosphate
  modified_base 16: mod_base = OTHER; note = 2'-deoxy-2'-fluoroguanosine-3'-phosphate
  modified_base 17: mod_base = OTHER; note = 2'-O-methylguanosine-3'-phosphate
  modified_base 18: mod_base = OTHER; note = 2'-O-methyluridine-3'-phosphate
  modified_base 19: mod_base = OTHER; note = 2'-O-methyluridine-3'-phosphate
  modified_base 20: mod_base = OTHER; note = 2'-O-methyluridine-3'-phosphate
  modified_base 21: mod_base = OTHER; note = 2'-O-methylguanosine-3'-phosphate
  modified_base 22: mod_base = OTHER; note = 2'-O-methylguanosine-3'-phosphate
  modified_base 23: mod_base = OTHER; note = 2'-O-methylcytidine
tacaaaaaatgccgaggtttggc

SEQ ID NO: 5365 - RNA, 23 nt, synthetic construct
  source 1..23: mol_type = other RNA
  modified_base 1: mod_base = OTHER; note = 2'-O-methyluridine-3'-phosphate 5'phosphate
  modified_base 2: mod_base = OTHER; note = 2'-deoxy-2'-fluorocytidine-3'-phosphate
  modified_base 3: mod_base = OTHER; note = 2'-O-methyladenosine-3'-phosphate
  modified_base 4: mod_base = OTHER; note = 2'-O-methylcytidine-3'-phosphate
  modified_base 5: mod_base = OTHER; note = 2'-O-methyladenosine-3'-phosphate
  modified_base 6: mod_base = OTHER; note = 2'-deoxy-2'-fluoroadenosine-3'-phosphate
  modified_base 7: mod_base = OTHER; note = 2'-O-methyladenosine-3'-phosphate
  modified_base 8: mod_base = OTHER; note = 2'-O-methyladenosine-3'-phosphate
  modified_base 9: mod_base = OTHER; note = 2'-O-methyladenosine-3'-phosphate
  modified_base 10: mod_base = OTHER; note = 2'-O-methyladenosine-3'-phosphate
  modified_base 11: mod_base = OTHER; note = 2'-O-methyluridine-3'-phosphate
  modified_base 12: mod_base = OTHER; note = 2'-O-methylguanosine-3'-phosphate
  modified_base 13: mod_base = OTHER; note = 2'-O-methylcytidine-3'-phosphate
  modified_base 14: mod_base = OTHER; note = 2'-deoxy-2'-fluorocytidine-3'-phosphate
  modified_base 15: mod_base = OTHER; note = 2'-O-methylguanosine-3'-phosphate
  modified_base 16: mod_base = OTHER; note = 2'-deoxy-2'-fluoroadenosine-3'-phosphate
  modified_base 17: mod_base = OTHER; note = 2'-O-methylguanosine-3'-phosphate
  modified_base 18: mod_base = OTHER; note = 2'-O-methylguanosine-3'-phosphate
  modified_base 19: mod_base = OTHER; note = 2'-O-methyluridine-3'-phosphate
  modified_base 20: mod_base = OTHER; note = 2'-O-methyluridine-3'-phosphate
  modified_base 21: mod_base = OTHER; note = 2'-O-methyluridine-3'-phosphate
  modified_base 22: mod_base = OTHER; note = 2'-O-methylguanosine-3'-phosphate
  modified_base 23: mod_base = OTHER; note = 2'-O-methylguanosine
tcacaaaaaatgccgaggtttgg

SEQ ID NO: 5366 - RNA, 23 nt, synthetic construct
  source 1..23: mol_type = other RNA
  modified_base 1: mod_base = OTHER; note = 2'-O-methyluridine-3'-phosphate 5'phosphate
  modified_base 2: mod_base = OTHER; note = 2'-deoxy-2'-fluoroadenosine-3'-phosphate
  modified_base 3: mod_base = OTHER; note = 2'-O-methylcytidine-3'-phosphate
  modified_base 4: mod_base = OTHER; note = 2'-O-methyladenosine-3'-phosphate
  modified_base 5: mod_base = OTHER; note = 2'-O-methylcytidine-3'-phosphate
  modified_base 6: mod_base = OTHER; note = 2'-deoxy-2'-fluoroadenosine-3'-phosphate
  modified_base 7: mod_base = OTHER; note = 2'-O-methyladenosine-3'-phosphate
  modified_base 8: mod_base = OTHER; note = 2'-O-methyladenosine-3'-phosphate
  modified_base 9: mod_base = OTHER; note = 2'-O-methyladenosine-3'-phosphate
  modified_base 10: mod_base = OTHER; note = 2'-O-methyladenosine-3'-phosphate
  modified_base 11: mod_base = OTHER; note = 2'-O-methyladenosine-3'-phosphate
  modified_base 12: mod_base = OTHER; note = 2'-O-methyluridine-3'-phosphate
  modified_base 13: mod_base = OTHER; note = 2'-O-methylguanosine-3'-phosphate
  modified_base 14: mod_base = OTHER; note = 2'-deoxy-2'-fluorocytidine-3'-phosphate
  modified_base 15: mod_base = OTHER; note = 2'-O-methylcytidine-3'-phosphate
  modified_base 16: mod_base = OTHER; note = 2'-deoxy-2'-fluoroguanosine-3'-phosphate
  modified_base 17: mod_base = OTHER; note = 2'-O-methyladenosine-3'-phosphate
  modified_base 18: mod_base = OTHER; note = 2'-O-methylguanosine-3'-phosphate
  modified_base 19: mod_base = OTHER; note = 2'-O-methylguanosine-3'-phosphate
  modified_base 20: mod_base = OTHER; note = 2'-O-methyluridine-3'-phosphate
  modified_base 21: mod_base = OTHER; note = 2'-O-methyluridine-3'-phosphate
  modified_base 22: mod_base = OTHER; note = 2'-O-methyluridine-3'-phosphate
  modified_base 23: mod_base = OTHER; note = 2'-O-methylguanosine
tacacaaaaaatgccgaggtttg

SEQ ID NO: 5367 - RNA, 23 nt, synthetic construct
  source 1..23: mol_type = other RNA
  modified_base 1: mod_base = OTHER; note = 2'-O-methyluridine-3'-phosphate 5'phosphate
  modified_base 2: mod_base = OTHER; note = 2'-deoxy-2'-fluoroadenosine-3'-phosphate
  modified_base 3: mod_base = OTHER; note = 2'-O-methyladenosine-3'-phosphate
  modified_base 4: mod_base = OTHER; note = 2'-O-methylcytidine-3'-phosphate
  modified_base 5: mod_base = OTHER; note = 2'-O-methyladenosine-3'-phosphate
  modified_base 6: mod_base = OTHER; note = 2'-deoxy-2'-fluorocytidine-3'-phosphate
  modified_base 7: mod_base = OTHER; note = 2'-O-methyladenosine-3'-phosphate
  modified_base 8: mod_base = OTHER; note = 2'-O-methyladenosine-3'-phosphate
  modified_base 9: mod_base = OTHER; note = 2'-O-methyladenosine-3'-phosphate
  modified_base 10: mod_base = OTHER; note = 2'-O-methyladenosine-3'-phosphate
  modified_base 11: mod_base = OTHER; note = 2'-O-methyladenosine-3'-phosphate
  modified_base 12: mod_base = OTHER; note = 2'-O-methyladenosine-3'-phosphate
  modified_base 13: mod_base = OTHER; note = 2'-O-methyluridine-3'-phosphate
  modified_base 14: mod_base = OTHER; note = 2'-deoxy-2'-fluoroguanosine-3'-phosphate
  modified_base 15: mod_base = OTHER; note = 2'-O-methylcytidine-3'-phosphate
  modified_base 16: mod_base = OTHER; note = 2'-deoxy-2'-fluorocytidine-3'-phosphate
  modified_base 17: mod_base = OTHER; note = 2'-O-methylguanosine-3'-phosphate
  modified_base 18: mod_base = OTHER; note = 2'-O-methyladenosine-3'-phosphate
  modified_base 19: mod_base = OTHER; note = 2'-O-methylguanosine-3'-phosphate
  modified_base 20: mod_base = OTHER; note = 2'-O-methylguanosine-3'-phosphate
  modified_base 21: mod_base = OTHER; note = 2'-O-methyluridine-3'-phosphate
  modified_base 22: mod_base = OTHER; note = 2'-O-methyluridine-3'-phosphate
  modified_base 23: mod_base = OTHER; note = 2'-O-methyluridine
taacacaaaaaatgccgaggttt

SEQ ID NO: 5368 - RNA, 23 nt, synthetic construct
  source 1..23: mol_type = other RNA
  modified_base 1: mod_base = OTHER; note = 2'-O-methyluridine-3'-phosphate 5'phosphate
  modified_base 2: mod_base = OTHER; note = 2'-deoxy-2'-fluorouridine-3'-phosphate
  modified_base 3: mod_base = OTHER; note = 2'-O-methyladenosine-3'-phosphate
  modified_base 4: mod_base = OTHER; note = 2'-O-methyladenosine-3'-phosphate
  modified_base 5: mod_base = OTHER; note = 2'-O-methylcytidine-3'-phosphate
  modified_base 6: mod_base = OTHER; note = 2'-deoxy-2'-fluoroadenosine-3'-phosphate
  modified_base 7: mod_base = OTHER; note = 2'-O-methylcytidine-3'-phosphate
  modified_base 8: mod_base = OTHER; note = 2'-O-methyladenosine-3'-phosphate
  modified_base 9: mod_base = OTHER; note = 2'-O-methyladenosine-3'-phosphate
  modified_base 10: mod_base = OTHER; note = 2'-O-methyladenosine-3'-phosphate
  modified_base 11: mod_base = OTHER; note = 2'-O-methyladenosine-3'-phosphate
  modified_base 12: mod_base = OTHER; note = 2'-O-methyladenosine-3'-phosphate
  modified_base 13: mod_base = OTHER; note = 2'-O-methyladenosine-3'-phosphate
  modified_base 14: mod_base = OTHER; note = 2'-deoxy-2'-fluorouridine-3'-phosphate
  modified_base 15: mod_base = OTHER; note = 2'-O-methylguanosine-3'-phosphate
  modified_base 16: mod_base = OTHER; note = 2'-deoxy-2'-fluorocytidine-3'-phosphate
  modified_base 17: mod_base = OTHER; note = 2'-O-methylcytidine-3'-phosphate
  modified_base 18: mod_base = OTHER; note = 2'-O-methylguanosine-3'-phosphate
  modified_base 19: mod_base = OTHER; note = 2'-O-methyladenosine-3'-phosphate
  modified_base 20: mod_base = OTHER; note = 2'-O-methylguanosine-3'-phosphate
  modified_base 21: mod_base = OTHER; note = 2'-O-methylguanosine-3'-phosphate
  modified_base 22: mod_base = OTHER; note = 2'-O-methyluridine-3'-phosphate
  modified_base 23: mod_base = OTHER; note = 2'-O-methyluridine
ttaacacaaaaaatgccgaggtt

SEQ ID NO: 5369 - RNA, 23 nt, synthetic construct
  source 1..23: mol_type = other RNA
  modified_base 1: mod_base = OTHER; note = 2'-O-methyluridine-3'-phosphate 5'phosphate
  modified_base 2: mod_base = OTHER; note = 2'-deoxy-2'-fluoroadenosine-3'-phosphate
  modified_base 3: mod_base = OTHER; note = 2'-O-methyluridine-3'-phosphate
  modified_base 4: mod_base = OTHER; note = 2'-O-methyladenosine-3'-phosphate
  modified_base 5: mod_base = OTHER; note = 2'-O-methyladenosine-3'-phosphate
  modified_base 6: mod_base = OTHER; note = 2'-deoxy-2'-fluorocytidine-3'-phosphate
  modified_base 7: mod_base = OTHER; note = 2'-O-methyladenosine-3'-phosphate
  modified_base 8: mod_base = OTHER; note = 2'-O-methylcytidine-3'-phosphate
  modified_base 9: mod_base = OTHER; note = 2'-O-methyladenosine-3'-phosphate
  modified_base 10: mod_base = OTHER; note = 2'-O-methyladenosine-3'-phosphate
  modified_base 11: mod_base = OTHER; note = 2'-O-methyladenosine-3'-phosphate
  modified_base 12: mod_base = OTHER; note = 2'-O-methyladenosine-3'-phosphate
  modified_base 13: mod_base = OTHER; note = 2'-O-methyladenosine-3'-phosphate
  modified_base 14: mod_base = OTHER; note = 2'-deoxy-2'-fluoroadenosine-3'-phosphate
  modified_base 15: mod_base = OTHER; note = 2'-O-methyluridine-3'-phosphate
  modified_base 16: mod_base = OTHER; note = 2'-deoxy-2'-fluoroguanosine-3'-phosphate
  modified_base 17: mod_base = OTHER; note = 2'-O-methylcytidine-3'-phosphate
  modified_base 18: mod_base = OTHER; note = 2'-O-methylcytidine-3'-phosphate
  modified_base 19: mod_base = OTHER; note = 2'-O-methylguanosine-3'-phosphate
  modified_base 20: mod_base = OTHER; note = 2'-O-methyladenosine-3'-phosphate
  modified_base 21: mod_base = OTHER; note = 2'-O-methylguanosine-3'-phosphate
  modified_base 22: mod_base = OTHER; note = 2'-O-methylguanosine-3'-phosphate
  modified_base 23: mod_base = OTHER; note = 2'-O-methyluridine
tataacacaaaaaatgccgaggt

SEQ ID NO: 5370 - RNA, 23 nt, synthetic construct
  source 1..23: mol_type = other RNA
  modified_base 1: mod_base = OTHER; note = 2'-O-methyluridine-3'-phosphate 5'phosphate
  modified_base 2: mod_base = OTHER; note = 2'-deoxy-2'-fluoroadenosine-3'-phosphate
  modified_base 3: mod_base = OTHER; note = 2'-O-methyladenosine-3'-phosphate
  modified_base 4: mod_base = OTHER; note = 2'-O-methyluridine-3'-phosphate
  modified_base 5: mod_base = OTHER; note = 2'-O-methyladenosine-3'-phosphate
  modified_base 6: mod_base = OTHER; note = 2'-deoxy-2'-fluoroadenosine-3'-phosphate
  modified_base 7: mod_base = OTHER; note = 2'-O-methylcytidine-3'-phosphate
  modified_base 8: mod_base = OTHER; note = 2'-O-methyladenosine-3'-phosphate
  modified_base 9: mod_base = OTHER; note = 2'-O-methylcytidine-3'-phosphate
  modified_base 10: mod_base = OTHER; note = 2'-O-methyladenosine-3'-phosphate
  modified_base 11: mod_base = OTHER; note = 2'-O-methyladenosine-3'-phosphate
  modified_base 12: mod_base = OTHER; note = 2'-O-methyladenosine-3'-phosphate
  modified_base 13: mod_base = OTHER; note = 2'-O-methyladenosine-3'-phosphate
  modified_base 14: mod_base = OTHER; note = 2'-deoxy-2'-fluoroadenosine-3'-phosphate
  modified_base 15: mod_base = OTHER; note = 2'-O-methyladenosine-3'-phosphate
  modified_base 16: mod_base = OTHER; note = 2'-deoxy-2'-fluorouridine-3'-phosphate
  modified_base 17: mod_base = OTHER; note = 2'-O-methylguanosine-3'-phosphate
  modified_base 18: mod_base = OTHER; note = 2'-O-methylcytidine-3'-phosphate
  modified_base 19: mod_base = OTHER; note = 2'-O-methylcytidine-3'-phosphate
  modified_base 20: mod_base = OTHER; note = 2'-O-methylguanosine-3'-phosphate
  modified_base 21: mod_base = OTHER; note = 2'-O-methyladenosine-3'-phosphate
  modified_base 22: mod_base = OTHER; note = 2'-O-methylguanosine-3'-phosphate
  modified_base 23: mod_base = OTHER; note = 2'-O-methylguanosine
taataacacaaaaaatgccgagg

SEQ ID NO: 5371 - RNA, 23 nt, synthetic construct
  source 1..23: mol_type = other RNA
  modified_base 1: mod_base = OTHER; note = 2'-O-methyluridine-3'-phosphate 5'phosphate
  modified_base 2: mod_base = OTHER; note = 2'-deoxy-2'-fluoroadenosine-3'-phosphate
  modified_base 3: mod_base = OTHER; note = 2'-O-methyladenosine-3'-phosphate
  modified_base 4: mod_base = OTHER; note = 2'-O-methyladenosine-3'-phosphate
  modified_base 5: mod_base = OTHER; note = 2'-O-methyladenosine-3'-phosphate
  modified_base 6: mod_base = OTHER; note = 2'-deoxy-2'-fluorouridine-3'-phosphate
  modified_base 7: mod_base = OTHER; note = 2'-O-methyladenosine-3'-phosphate
  modified_base 8: mod_base = OTHER; note = 2'-O-methyladenosine-3'-phosphate
  modified_base 9: mod_base = OTHER; note = 2'-O-methylcytidine-3'-phosphate
  modified_base 10: mod_base = OTHER; note = 2'-O-methyladenosine-3'-phosphate
  modified_base 11: mod_base = OTHER; note = 2'-O-methylcytidine-3'-phosphate
  modified_base 12: mod_base = OTHER; note = 2'-O-methyladenosine-3'-phosphate
  modified_base 13: mod_base = OTHER; note = 2'-O-methyladenosine-3'-phosphate
  modified_base 14: mod_base = OTHER; note = 2'-deoxy-2'-fluoroadenosine-3'-phosphate
  modified_base 15: mod_base = OTHER; note = 2'-O-methyladenosine-3'-phosphate
  modified_base 16: mod_base = OTHER; note = 2'-deoxy-2'-fluoroadenosine-3'-phosphate
  modified_base 17: mod_base = OTHER; note = 2'-O-methyladenosine-3'-phosphate
  modified_base 18: mod_base = OTHER; note = 2'-O-methyluridine-3'-phosphate
  modified_base 19: mod_base = OTHER; note = 2'-O-methylguanosine-3'-phosphate
  modified_base 20: mod_base = OTHER; note = 2'-O-methylcytidine-3'-phosphate
  modified_base 21: mod_base = OTHER; note = 2'-O-methylcytidine-3'-phosphate
  modified_base 22: mod_base = OTHER; note = 2'-O-methylguanosine-3'-phosphate
  modified_base 23: mod_base = OTHER; note = 2'-O-methyladenosine
taaaataacacaaaaaatgccga

SEQ ID NO: 5372 - RNA, 23 nt, synthetic construct
  source 1..23: mol_type = other RNA
  modified_base 1: mod_base = OTHER; note = 2'-O-methyluridine-3'-phosphate 5'phosphate
  modified_base 2: mod_base = OTHER; note = 2'-deoxy-2'-fluoroguanosine-3'-phosphate
  modified_base 3: mod_base = OTHER; note = 2'-O-methyladenosine-3'-phosphate
  modified_base 4: mod_base = OTHER; note = 2'-O-methyladenosine-3'-phosphate
  modified_base 5: mod_base = OTHER; note = 2'-O-methyladenosine-3'-phosphate
  modified_base 6: mod_base = OTHER; note = 2'-deoxy-2'-fluoroadenosine-3'-phosphate
  modified_base 7: mod_base = OTHER; note = 2'-O-methyluridine-3'-phosphate
  modified_base 8: mod_base = OTHER; note = 2'-O-methyladenosine-3'-phosphate
  modified_base 9: mod_base = OTHER; note = 2'-O-methyladenosine-3'-phosphate
  modified_base 10: mod_base = OTHER; note = 2'-O-methylcytidine-3'-phosphate
  modified_base 11: mod_base = OTHER; note = 2'-O-methyladenosine-3'-phosphate
  modified_base 12: mod_base = OTHER; note = 2'-O-methylcytidine-3'-phosphate
  modified_base 13: mod_base = OTHER; note = 2'-O-methyladenosine-3'-phosphate
  modified_base 14: mod_base = OTHER; note = 2'-deoxy-2'-fluoroadenosine-3'-phosphate
  modified_base 15: mod_base = OTHER; note = 2'-O-methyladenosine-3'-phosphate
  modified_base 16: mod_base = OTHER; note = 2'-deoxy-2'-fluoroadenosine-3'-phosphate
  modified_base 17: mod_base = OTHER; note = 2'-O-methyladenosine-3'-phosphate
  modified_base 18: mod_base = OTHER; note = 2'-O-methyladenosine-3'-phosphate
  modified_base 19: mod_base = OTHER; note = 2'-O-methyluridine-3'-phosphate
  modified_base 20: mod_base = OTHER; note = 2'-O-methylguanosine-3'-phosphate
  modified_base 21: mod_base = OTHER; note = 2'-O-methylcytidine-3'-phosphate
  modified_base 22: mod_base = OTHER; note = 2'-O-methylcytidine-3'-phosphate
  modified_base 23: mod_base = OTHER; note = 2'-O-methylguanosine
tgaaaataacacaaaaaatgccg

SEQ ID NO: 5373 - RNA, 23 nt, synthetic construct
  source 1..23: mol_type = other RNA
  modified_base 1: mod_base = OTHER; note = 2'-O-methyluridine-3'-phosphate 5'phosphate
  modified_base 2: mod_base = OTHER; note = 2'-deoxy-2'-fluoroadenosine-3'-phosphate
  modified_base 3: mod_base = OTHER; note = 2'-O-methylguanosine-3'-phosphate
  modified_base 4: mod_base = OTHER; note = 2'-O-methyladenosine-3'-phosphate
  modified_base 5: mod_base = OTHER; note = 2'-O-methyladenosine-3'-phosphate
  modified_base 6: mod_base = OTHER; note = 2'-deoxy-2'-fluoroadenosine-3'-phosphate
  modified_base 7: mod_base = OTHER; note = 2'-O-methyladenosine-3'-phosphate
  modified_base 8: mod_base = OTHER; note = 2'-O-methyluridine-3'-phosphate
  modified_base 9: mod_base = OTHER; note = 2'-O-methyladenosine-3'-phosphate
  modified_base 10: mod_base = OTHER; note = 2'-O-methyladenosine-3'-phosphate
  modified_base 11: mod_base = OTHER; note = 2'-O-methylcytidine-3'-phosphate
  modified_base 12: mod_base = OTHER; note = 2'-O-methyladenosine-3'-phosphate
  modified_base 13: mod_base = OTHER; note = 2'-O-methylcytidine-3'-phosphate
  modified_base 14: mod_base = OTHER; note = 2'-deoxy-2'-fluoroadenosine-3'-phosphate
  modified_base 15: mod_base = OTHER; note = 2'-O-methyladenosine-3'-phosphate
  modified_base 16: mod_base = OTHER; note = 2'-deoxy-2'-fluoroadenosine-3'-phosphate
  modified_base 17: mod_base = OTHER; note = 2'-O-methyladenosine-3'-phosphate
  modified_base 18: mod_base = OTHER; note = 2'-O-methyladenosine-3'-phosphate
  modified_base 19: mod_base = OTHER; note = 2'-O-methyladenosine-3'-phosphate
  modified_base 20: mod_base = OTHER; note = 2'-O-methyluridine-3'-phosphate
  modified_base 21: mod_base = OTHER; note = 2'-O-methylguanosine-3'-phosphate
  modified_base 22: mod_base = OTHER; note = 2'-O-methylcytidine-3'-phosphate
  modified_base 23: mod_base = OTHER; note = 2'-O-methylcytidine
tagaaaataacacaaaaaatgcc

SEQ ID NO: 5374 - RNA, 23 nt, synthetic construct
  source 1..23: mol_type = other RNA
  modified_base 1: mod_base = OTHER; note = 2'-O-methyluridine-3'-phosphate 5'phosphate
  modified_base 2: mod_base = OTHER; note = 2'-deoxy-2'-fluorocytidine-3'-phosphate
  modified_base 3: mod_base = OTHER; note = 2'-O-methyladenosine-3'-phosphate
  modified_base 4: mod_base = OTHER; note = 2'-O-methylguanosine-3'-phosphate
  modified_base 5: mod_base = OTHER; note = 2'-O-methyluridine-3'-phosphate
  modified_base 6: mod_base = OTHER; note = 2'-deoxy-2'-fluorocytidine-3'-phosphate
  modified_base 7: mod_base = OTHER; note = 2'-O-methyladenosine-3'-phosphate
  modified_base 8: mod_base = OTHER; note = 2'-O-methylguanosine-3'-phosphate
  modified_base 9: mod_base = OTHER; note = 2'-O-methyladenosine-3'-phosphate
  modified_base 10: mod_base = OTHER; note = 2'-O-methyladenosine-3'-phosphate
  modified_base 11: mod_base = OTHER; note = 2'-O-methyladenosine-3'-phosphate
  modified_base 12: mod_base = OTHER; note = 2'-O-methyladenosine-3'-phosphate
  modified_base 13: mod_base = OTHER; note = 2'-O-methyluridine-3'-phosphate
  modified_base 14: mod_base = OTHER; note = 2'-deoxy-2'-fluoroadenosine-3'-phosphate
  modified_base 15: mod_base = OTHER; note = 2'-O-methyladenosine-3'-phosphate
  modified_base 16: mod_base = OTHER; note = 2'-deoxy-2'-fluorocytidine-3'-phosphate
  modified_base 17: mod_base = OTHER; note = 2'-O-methyladenosine-3'-phosphate
  modified_base 18: mod_base = OTHER; note = 2'-O-methylcytidine-3'-phosphate
  modified_base 19: mod_base = OTHER; note = 2'-O-methyladenosine-3'-phosphate
  modified_base 20: mod_base = OTHER; note = 2'-O-methyladenosine-3'-phosphate
  modified_base 21: mod_base = OTHER; note = 2'-O-methyladenosine-3'-phosphate
  modified_base 22: mod_base = OTHER; note = 2'-O-methyladenosine-3'-phosphate
  modified_base 23: mod_base = OTHER; note = 2'-O-methyladenosine
tcagtcagaaaataacacaaaaa

SEQ ID NO: 5375 - RNA, 23 nt, synthetic construct
  source 1..23: mol_type = other RNA
  modified_base 1: mod_base = OTHER; note = 2'-O-methyluridine-3'-phosphate 5'phosphate
  modified_base 2: mod_base = OTHER; note = 2'-deoxy-2'-fluoroguanosine-3'-phosphate
  modified_base 3: mod_base = OTHER; note = 2'-O-methylcytidine-3'-phosphate
  modified_base 4: mod_base = OTHER; note = 2'-O-methyladenosine-3'-phosphate
  modified_base 5: mod_base = OTHER; note = 2'-O-methylguanosine-3'-phosphate
  modified_base 6: mod_base = OTHER; note = 2'-deoxy-2'-fluorouridine-3'-phosphate
  modified_base 7: mod_base = OTHER; note = 2'-O-methylcytidine-3'-phosphate
  modified_base 8: mod_base = OTHER; note = 2'-O-methyladenosine-3'-phosphate
  modified_base 9: mod_base = OTHER; note = 2'-O-methylguanosine-3'-phosphate
  modified_base 10: mod_base = OTHER; note = 2'-O-methyladenosine-3'-phosphate
  modified_base 11: mod_base = OTHER; note = 2'-O-methyladenosine-3'-phosphate
  modified_base 12: mod_base = OTHER; note = 2'-O-methyladenosine-3'-phosphate
  modified_base 13: mod_base = OTHER; note = 2'-O-methyladenosine-3'-phosphate
  modified_base 14: mod_base = OTHER; note = 2'-deoxy-2'-fluorouridine-3'-phosphate
  modified_base 15: mod_base = OTHER; note = 2'-O-methyladenosine-3'-phosphate
  modified_base 16: mod_base = OTHER; note = 2'-deoxy-2'-fluoroadenosine-3'-phosphate
  modified_base 17: mod_base = OTHER; note = 2'-O-methylcytidine-3'-phosphate
  modified_base 18: mod_base = OTHER; note = 2'-O-methyladenosine-3'-phosphate
  modified_base 19: mod_base = OTHER; note = 2'-O-methylcytidine-3'-phosphate
  modified_base 20: mod_base = OTHER; note = 2'-O-methyladenosine-3'-phosphate
  modified_base 21: mod_base = OTHER; note = 2'-O-methyladenosine-3'-phosphate
  modified_base 22: mod_base = OTHER; note = 2'-O-methyladenosine-3'-phosphate
  modified_base 23: mod_base = OTHER; note = 2'-O-methyladenosine
tgcagtcagaaaataacacaaaa

SEQ ID NO: 5376 - RNA, 23 nt, synthetic construct
  source 1..23: mol_type = other RNA
  modified_base 1: mod_base = OTHER; note = 2'-O-methyluridine-3'-phosphate 5'phosphate
  modified_base 2: mod_base = OTHER; note = 2'-deoxy-2'-fluoroadenosine-3'-phosphate
  modified_base 3: mod_base = OTHER; note = 2'-O-methylguanosine-3'-phosphate
  modified_base 4: mod_base = OTHER; note = 2'-O-methylcytidine-3'-phosphate
  modified_base 5: mod_base = OTHER; note = 2'-O-methyladenosine-3'-phosphate
  modified_base 6: mod_base = OTHER; note = 2'-deoxy-2'-fluoroguanosine-3'-phosphate
  modified_base 7: mod_base = OTHER; note = 2'-O-methyluridine-3'-phosphate
  modified_base 8: mod_base = OTHER; note = 2'-O-methylcytidine-3'-phosphate
  modified_base 9: mod_base = OTHER; note = 2'-O-methyladenosine-3'-phosphate
  modified_base 10: mod_base = OTHER; note = 2'-O-methylguanosine-3'-phosphate
  modified_base 11: mod_base = OTHER; note = 2'-O-methyladenosine-3'-phosphate
  modified_base 12: mod_base = OTHER; note = 2'-O-methyladenosine-3'-phosphate
  modified_base 13: mod_base = OTHER; note = 2'-O-methyladenosine-3'-phosphate
  modified_base 14: mod_base = OTHER; note = 2'-deoxy-2'-fluoroadenosine-3'-phosphate
  modified_base 15: mod_base = OTHER; note = 2'-O-methyluridine-3'-phosphate
  modified_base 16: mod_base = OTHER; note = 2'-deoxy-2'-fluoroadenosine-3'-phosphate
  modified_base 17: mod_base = OTHER; note = 2'-O-methyladenosine-3'-phosphate
  modified_base 18: mod_base = OTHER; note = 2'-O-methylcytidine-3'-phosphate
  modified_base 19: mod_base = OTHER; note = 2'-O-methyladenosine-3'-phosphate
  modified_base 20: mod_base = OTHER; note = 2'-O-methylcytidine-3'-phosphate
  modified_base 21: mod_base = OTHER; note = 2'-O-methyladenosine-3'-phosphate
  modified_base 22: mod_base = OTHER; note = 2'-O-methyladenosine-3'-phosphate
  modified_base 23: mod_base = OTHER; note = 2'-O-methyladenosine
tagcagtcagaaaataacacaaa

SEQ ID NO: 5377 - RNA, 23 nt, synthetic construct
  source 1..23: mol_type = other RNA
  modified_base 1: mod_base = OTHER; note = 2'-O-methyluridine-3'-phosphate 5'phosphate
  modified_base 2: mod_base = OTHER; note = 2'-deoxy-2'-fluorocytidine-3'-phosphate
  modified_base 3: mod_base = OTHER; note = 2'-O-methyladenosine-3'-phosphate
  modified_base 4: mod_base = OTHER; note = 2'-O-methylguanosine-3'-phosphate
  modified_base 5: mod_base = OTHER; note = 2'-O-methylcytidine-3'-phosphate
  modified_base 6: mod_base = OTHER; note = 2'-deoxy-2'-fluoroadenosine-3'-phosphate
  modified_base 7: mod_base = OTHER; note = 2'-O-methylguanosine-3'-phosphate
  modified_base 8: mod_base = OTHER; note = 2'-O-methyluridine-3'-phosphate
  modified_base 9: mod_base = OTHER; note = 2'-O-methylcytidine-3'-phosphate
  modified_base 10: mod_base = OTHER; note = 2'-O-methyladenosine-3'-phosphate
  modified_base 11: mod_base = OTHER; note = 2'-O-methylguanosine-3'-phosphate
  modified_base 12: mod_base = OTHER; note = 2'-O-methyladenosine-3'-phosphate
  modified_base 13: mod_base = OTHER; note = 2'-O-methyladenosine-3'-phosphate
  modified_base 14: mod_base = OTHER; note = 2'-deoxy-2'-fluoroadenosine-3'-phosphate
  modified_base 15: mod_base = OTHER; note = 2'-O-methyladenosine-3'-phosphate
  modified_base 16: mod_base = OTHER; note = 2'-deoxy-2'-fluorouridine-3'-phosphate
  modified_base 17: mod_base = OTHER; note = 2'-O-methyladenosine-3'-phosphate
  modified_base 18: mod_base = OTHER; note = 2'-O-methyladenosine-3'-phosphate
  modified_base 19: mod_base = OTHER; note = 2'-O-methylcytidine-3'-phosphate
  modified_base 20: mod_base = OTHER; note = 2'-O-methyladenosine-3'-phosphate
  modified_base 21: mod_base = OTHER; note = 2'-O-methylcytidine-3'-phosphate
  modified_base 22: mod_base = OTHER; note = 2'-O-methyladenosine-3'-phosphate
  modified_base 23: mod_base = OTHER; note = 2'-O-methyladenosine
tcagcagtcagaaaataacacaa

SEQ ID NO: 5378 - RNA, 23 nt, synthetic construct
  source 1..23: mol_type = other RNA
  modified_base 1: mod_base = OTHER; note = 2'-O-methyluridine-3'-phosphate 5'phosphate
  modified_base 2: mod_base = OTHER; note = 2'-deoxy-2'-fluorocytidine-3'-phosphate
  modified_base 3: mod_base = OTHER; note = 2'-O-methylcytidine-3'-phosphate
  modified_base 4: mod_base = OTHER; note = 2'-O-methyladenosine-3'-phosphate
  modified_base 5: mod_base = OTHER; note = 2'-O-methylguanosine-3'-phosphate
  modified_base 6: mod_base = OTHER; note = 2'-deoxy-2'-fluorocytidine-3'-phosphate
  modified_base 7: mod_base = OTHER; note = 2'-O-methyladenosine-3'-phosphate
  modified_base 8: mod_base = OTHER; note = 2'-O-methylguanosine-3'-phosphate
  modified_base 9: mod_base = OTHER; note = 2'-O-methyluridine-3'-phosphate
  modified_base 10: mod_base = OTHER; note = 2'-O-methylcytidine-3'-phosphate
  modified_base 11: mod_base = OTHER; note = 2'-O-methyladenosine-3'-phosphate
  modified_base 12: mod_base = OTHER; note = 2'-O-methylguanosine-3'-phosphate
  modified_base 13: mod_base = OTHER; note = 2'-O-methyladenosine-3'-phosphate
  modified_base 14: mod_base = OTHER; note = 2'-deoxy-2'-fluoroadenosine-3'-phosphate
  modified_base 15: mod_base = OTHER; note = 2'-O-methyladenosine-3'-phosphate
  modified_base 16: mod_base = OTHER; note = 2'-deoxy-2'-fluoroadenosine-3'-phosphate
  modified_base 17: mod_base = OTHER; note = 2'-O-methyluridine-3'-phosphate
  modified_base 18: mod_base = OTHER; note = 2'-O-methyladenosine-3'-phosphate
  modified_base 19: mod_base = OTHER; note = 2'-O-methyladenosine-3'-phosphate
  modified_base 20: mod_base = OTHER; note = 2'-O-methylcytidine-3'-phosphate
  modified_base 21: mod_base = OTHER; note = 2'-O-methyladenosine-3'-phosphate
  modified_base 22: mod_base = OTHER; note = 2'-O-methylcytidine-3'-phosphate
  modified_base 23: mod_base = OTHER; note = 2'-O-methyladenosine
tccagcagtcagaaaataacaca

SEQ ID NO: 5379 - RNA, 23 nt, synthetic construct
  source 1..23: mol_type = other RNA
  modified_base 1: mod_base = OTHER; note = 2'-O-methyluridine-3'-phosphate 5'phosphate
  modified_base 2: mod_base = OTHER; note = 2'-deoxy-2'-fluorouridine-3'-phosphate
  modified_base 3: mod_base = OTHER; note = 2'-O-methylcytidine-3'-phosphate
  modified_base 4: mod_base = OTHER; note = 2'-O-methylcytidine-3'-phosphate
  modified_base 5: mod_base = OTHER; note = 2'-O-methyladenosine-3'-phosphate
  modified_base 6: mod_base = OTHER; note = 2'-deoxy-2'-fluoroguanosine-3'-phosphate
  modified_base 7: mod_base = OTHER; note = 2'-O-methylcytidine-3'-phosphate
  modified_base 8: mod_base = OTHER; note = 2'-O-methyladenosine-3'-phosphate
  modified_base 9: mod_base = OTHER; note = 2'-O-methylguanosine-3'-phosphate
  modified_base 10: mod_base = OTHER; note = 2'-O-methyluridine-3'-phosphate
  modified_base 11: mod_base = OTHER; note = 2'-O-methylcytidine-3'-phosphate
  modified_base 12: mod_base = OTHER; note = 2'-O-methyladenosine-3'-phosphate
  modified_base 13: mod_base = OTHER; note = 2'-O-methylguanosine-3'-phosphate
  modified_base 14: mod_base = OTHER; note = 2'-deoxy-2'-fluoroadenosine-3'-phosphate
  modified_base 15: mod_base = OTHER; note = 2'-O-methyladenosine-3'-phosphate
  modified_base 16: mod_base = OTHER; note = 2'-deoxy-2'-fluoroadenosine-3'-phosphate
  modified_base 17: mod_base = OTHER; note = 2'-O-methyladenosine-3'-phosphate
  modified_base 18: mod_base = OTHER; note = 2'-O-methyluridine-3'-phosphate
  modified_base 19: mod_base = OTHER; note = 2'-O-methyladenosine-3'-phosphate
  modified_base 20: mod_base = OTHER; note = 2'-O-methyladenosine-3'-phosphate
  modified_base 21: mod_base = OTHER; note = 2'-O-methylcytidine-3'-phosphate
  modified_base 22: mod_base = OTHER; note = 2'-O-methyladenosine-3'-phosphate
  modified_base 23: mod_base = OTHER; note = 2'-O-methylcytidine
ttccagcagtcagaaaataacac

SEQ ID NO: 5380 - RNA, 23 nt, synthetic construct
  source 1..23: mol_type = other RNA
  modified_base 1: mod_base = OTHER; note = 2'-O-methyluridine-3'-phosphate 5'phosphate
  modified_base 2: mod_base = OTHER; note = 2'-deoxy-2'-fluoroadenosine-3'-phosphate
  modified_base 3: mod_base = OTHER; note = 2'-O-methyluridine-3'-phosphate
  modified_base 4: mod_base = OTHER; note = 2'-O-methylcytidine-3'-phosphate
  modified_base 5: mod_base = OTHER; note = 2'-O-methylcytidine-3'-phosphate
  modified_base 6: mod_base = OTHER; note = 2'-deoxy-2'-fluoroadenosine-3'-phosphate
  modified_base 7: mod_base = OTHER; note = 2'-O-methylguanosine-3'-phosphate
  modified_base 8: mod_base = OTHER; note = 2'-O-methylcytidine-3'-phosphate
  modified_base 9: mod_base = OTHER; note = 2'-O-methyladenosine-3'-phosphate
  modified_base 10: mod_base = OTHER; note = 2'-O-methylguanosine-3'-phosphate
  modified_base 11: mod_base = OTHER; note = 2'-O-methyluridine-3'-phosphate
  modified_base 12: mod_base = OTHER; note = 2'-O-methylcytidine-3'-phosphate
  modified_base 13: mod_base = OTHER; note = 2'-O-methyladenosine-3'-phosphate
  modified_base 14: mod_base = OTHER; note = 2'-deoxy-2'-fluoroguanosine-3'-phosphate
  modified_base 15: mod_base = OTHER; note = 2'-O-methyladenosine-3'-phosphate
  modified_base 16: mod_base = OTHER; note = 2'-deoxy-2'-fluoroadenosine-3'-phosphate
  modified_base 17: mod_base = OTHER; note = 2'-O-methyladenosine-3'-phosphate
  modified_base 18: mod_base = OTHER; note = 2'-O-methyladenosine-3'-phosphate
  modified_base 19: mod_base = OTHER; note = 2'-O-methyluridine-3'-phosphate
  modified_base 20: mod_base = OTHER; note = 2'-O-methyladenosine-3'-phosphate
  modified_base 21: mod_base = OTHER; note = 2'-O-methyladenosine-3'-phosphate
  modified_base 22: mod_base = OTHER; note = 2'-O-methylcytidine-3'-phosphate
  modified_base 23: mod_base = OTHER; note = 2'-O-methyladenosine
tatccagcagtcagaaaataaca

SEQ ID NO: 5381 - RNA, 23 nt, synthetic construct
  source 1..23: mol_type = other RNA
  modified_base 1: mod_base = OTHER; note = 2'-O-methyluridine-3'-phosphate 5'phosphate
  modified_base 2: mod_base = OTHER; note = 2'-deoxy-2'-fluoroadenosine-3'-phosphate
  modified_base 3: mod_base = OTHER; note = 2'-O-methyladenosine-3'-phosphate
  modified_base 4: mod_base = OTHER; note = 2'-O-methyluridine-3'-phosphate
  modified_base 5: mod_base = OTHER; note = 2'-O-methylcytidine-3'-phosphate
  modified_base 6: mod_base = OTHER; note = 2'-deoxy-2'-fluorocytidine-3'-phosphate
  modified_base 7: mod_base = OTHER; note = 2'-O-methyladenosine-3'-phosphate
  modified_base 8: mod_base = OTHER; note = 2'-O-methylguanosine-3'-phosphate
  modified_base 9: mod_base = OTHER; note = 2'-O-methylcytidine-3'-phosphate
  modified_base 10: mod_base = OTHER; note = 2'-O-methyladenosine-3'-phosphate
  modified_base 11: mod_base = OTHER; note = 2'-O-methylguanosine-3'-phosphate
  modified_base 12: mod_base = OTHER; note = 2'-O-methyluridine-3'-phosphate
  modified_base 13: mod_base = OTHER; note = 2'-O-methylcytidine-3'-phosphate
  modified_base 14: mod_base = OTHER; note = 2'-deoxy-2'-fluoroadenosine-3'-phosphate
  modified_base 15: mod_base = OTHER; note = 2'-O-methylguanosine-3'-phosphate
  modified_base 16: mod_base = OTHER; note = 2'-deoxy-2'-fluoroadenosine-3'-phosphate
  modified_base 17: mod_base = OTHER; note = 2'-O-methyladenosine-3'-phosphate
  modified_base 18: mod_base = OTHER; note = 2'-O-methyladenosine-3'-phosphate
  modified_base 19: mod_base = OTHER; note = 2'-O-methyladenosine-3'-phosphate
  modified_base 20: mod_base = OTHER; note = 2'-O-methyluridine-3'-phosphate
  modified_base 21: mod_base = OTHER; note = 2'-O-methyladenosine-3'-phosphate
  modified_base 22: mod_base = OTHER; note = 2'-O-methyladenosine-3'-phosphate
  modified_base 23: mod_base = OTHER; note = 2'-O-methylcytidine
taatccagcagtcagaaaataac

SEQ ID NO: 5382 - RNA, 23 nt, synthetic construct
  source 1..23: mol_type = other RNA
  modified_base 1: mod_base = OTHER; note = 2'-O-methyluridine-3'-phosphate 5'phosphate
  modified_base 2: mod_base = OTHER; note = 2'-deoxy-2'-fluoroguanosine-3'-phosphate
  modified_base 3: mod_base = OTHER; note = 2'-O-methyladenosine-3'-phosphate
  modified_base 4: mod_base = OTHER; note = 2'-O-methyladenosine-3'-phosphate
  modified_base 5: mod_base = OTHER; note = 2'-O-methyluridine-3'-phosphate
  modified_base 6: mod_base = OTHER; note = 2'-deoxy-2'-fluorocytidine-3'-phosphate
  modified_base 7: mod_base = OTHER; note = 2'-O-methylcytidine-3'-phosphate
  modified_base 8: mod_base = OTHER; note = 2'-O-methyladenosine-3'-phosphate
  modified_base 9: mod_base = OTHER; note = 2'-O-methylguanosine-3'-phosphate
  modified_base 10: mod_base = OTHER; note = 2'-O-methylcytidine-3'-phosphate
  modified_base 11: mod_base = OTHER; note = 2'-O-methyladenosine-3'-phosphate
  modified_base 12: mod_base = OTHER; note = 2'-O-methylguanosine-3'-phosphate
  modified_base 13: mod_base = OTHER; note = 2'-O-methyluridine-3'-phosphate
  modified_base 14: mod_base = OTHER; note = 2'-deoxy-2'-fluorocytidine-3'-phosphate
  modified_base 15: mod_base = OTHER; note = 2'-O-methyladenosine-3'-phosphate
  modified_base 16: mod_base = OTHER; note = 2'-deoxy-2'-fluoroguanosine-3'-phosphate
  modified_base 17: mod_base = OTHER; note = 2'-O-methyladenosine-3'-phosphate
  modified_base 18: mod_base = OTHER; note = 2'-O-methyladenosine-3'-phosphate
  modified_base 19: mod_base = OTHER; note = 2'-O-methyladenosine-3'-phosphate
  modified_base 20: mod_base = OTHER; note = 2'-O-methyladenosine-3'-phosphate
  modified_base 21: mod_base = OTHER; note = 2'-O-methyluridine-3'-phosphate
  modified_base 22: mod_base = OTHER; note = 2'-O-methyladenosine-3'-phosphate
  modified_base 23: mod_base = OTHER; note = 2'-O-methyladenosine
tgaatccagcagtcagaaaataa

SEQ ID NO: 5383 - RNA, 23 nt, synthetic construct
  source 1..23: mol_type = other RNA
  modified_base 1: mod_base = OTHER; note = 2'-O-methyluridine-3'-phosphate 5'phosphate
  modified_base 2: mod_base = OTHER; note = 2'-deoxy-2'-fluorouridine-3'-phosphate
  modified_base 3: mod_base = OTHER; note = 2'-O-methyladenosine-3'-phosphate
  modified_base 4: mod_base = OTHER; note = 2'-O-methylcytidine-3'-phosphate
  modified_base 5: mod_base = OTHER; note = 2'-O-methyladenosine-3'-phosphate
  modified_base 6: mod_base = OTHER; note = 2'-deoxy-2'-fluoroguanosine-3'-phosphate
  modified_base 7: mod_base = OTHER; note = 2'-O-methyladenosine-3'-phosphate
  modified_base 8: mod_base = OTHER; note = 2'-O-methyladenosine-3'-phosphate
  modified_base 9: mod_base = OTHER; note = 2'-O-methyluridine-3'-phosphate
  modified_base 10: mod_base = OTHER; note = 2'-O-methylcytidine-3'-phosphate
  modified_base 11: mod_base = OTHER; note = 2'-O-methylcytidine-3'-phosphate
  modified_base 12: mod_base = OTHER; note = 2'-O-methyladenosine-3'-phosphate
  modified_base 13: mod_base = OTHER; note = 2'-O-methylguanosine-3'-phosphate
  modified_base 14: mod_base = OTHER; note = 2'-deoxy-2'-fluorocytidine-3'-phosphate
  modified_base 15: mod_base = OTHER; note = 2'-O-methyladenosine-3'-phosphate
  modified_base 16: mod_base = OTHER; note = 2'-deoxy-2'-fluoroguanosine-3'-phosphate
  modified_base 17: mod_base = OTHER; note = 2'-O-methyluridine-3'-phosphate
  modified_base 18: mod_base = OTHER; note = 2'-O-methylcytidine-3'-phosphate
  modified_base 19: mod_base = OTHER; note = 2'-O-methyladenosine-3'-phosphate
  modified_base 20: mod_base = OTHER; note = 2'-O-methylguanosine-3'-phosphate
  modified_base 21: mod_base = OTHER; note = 2'-O-methyladenosine-3'-phosphate
  modified_base 22: mod_base = OTHER; note = 2'-O-methyladenosine-3'-phosphate
  modified_base 23: mod_base = OTHER; note = 2'-O-methyladenosine
ttacagaatccagcagtcagaaa

SEQ ID NO: 5384 - RNA, 23 nt, synthetic construct
  source 1..23: mol_type = other RNA
  modified_base 1: mod_base = OTHER; note = 2'-O-methyluridine-3'-phosphate 5'phosphate
  modified_base 2: mod_base = OTHER; note = 2'-deoxy-2'-fluorocytidine-3'-phosphate
  modified_base 3: mod_base = OTHER; note = 2'-O-methyladenosine-3'-phosphate
  modified_base 4: mod_base = OTHER; note = 2'-O-methyluridine-3'-phosphate
  modified_base 5: mod_base = OTHER; note = 2'-O-methyladenosine-3'-phosphate
  modified_base 6: mod_base = OTHER; note = 2'-deoxy-2'-fluoroguanosine-3'-phosphate
  modified_base 7: mod_base = OTHER; note = 2'-O-methylcytidine-3'-phosphate
  modified_base 8: mod_base = OTHER; note = 2'-O-methyluridine-3'-phosphate
  modified_base 9: mod_base = OTHER; note = 2'-O-methyladenosine-3'-phosphate
  modified_base 10: mod_base = OTHER; note = 2'-O-methyluridine-3'-phosphate
  modified_base 11: mod_base = OTHER; note = 2'-O-methylguanosine-3'-phosphate
  modified_base 12: mod_base = OTHER; note = 2'-O-methyluridine-3'-phosphate
  modified_base 13: mod_base = OTHER; note = 2'-O-methylcytidine-3'-phosphate
  modified_base 14: mod_base = OTHER; note = 2'-deoxy-2'-fluoroadenosine-3'-phosphate
  modified_base 15: mod_base = OTHER; note = 2'-O-methylcytidine-3'-phosphate
  modified_base 16: mod_base = OTHER; note = 2'-deoxy-2'-fluorocytidine-3'-phosphate
  modified_base 17: mod_base = OTHER; note = 2'-O-methyluridine-3'-phosphate
  modified_base 18: mod_base = OTHER; note = 2'-O-methyluridine-3'-phosphate
  modified_base 19: mod_base = OTHER; note = 2'-O-methyladenosine-3'-phosphate
  modified_base 20: mod_base = OTHER; note = 2'-O-methylcytidine-3'-phosphate
  modified_base 21: mod_base = OTHER; note = 2'-O-methyluridine-3'-phosphate
  modified_base 22: mod_base = OTHER; note = 2'-O-methyladenosine-3'-phosphate
  modified_base 23: mod_base = OTHER; note = 2'-O-methylcytidine
tcatagctatgtcaccttactac

SEQ ID NO: 5385 - RNA, 23 nt, synthetic construct
  source 1..23: mol_type = other RNA
  modified_base 1: mod_base = OTHER; note = 2'-O-methyluridine-3'-phosphate 5'phosphate
  modified_base 2: mod_base = OTHER; note = 2'-deoxy-2'-fluorouridine-3'-phosphate
  modified_base 3: mod_base = OTHER; note = 2'-O-methylcytidine-3'-phosphate
  modified_base 4: mod_base = OTHER; note = 2'-O-methyladenosine-3'-phosphate
  modified_base 5: mod_base = OTHER; note = 2'-O-methyluridine-3'-phosphate
  modified_base 6: mod_base = OTHER; note = 2'-deoxy-2'-fluoroadenosine-3'-phosphate
  modified_base 7: mod_base = OTHER; note = 2'-O-methylguanosine-3'-phosphate
  modified_base 8: mod_base = OTHER; note = 2'-O-methylcytidine-3'-phosphate
  modified_base 9: mod_base = OTHER; note = 2'-O-methyluridine-3'-phosphate
  modified_base 10: mod_base = OTHER; note = 2'-O-methyladenosine-3'-phosphate
  modified_base 11: mod_base = OTHER; note = 2'-O-methyluridine-3'-phosphate
  modified_base 12: mod_base = OTHER; note = 2'-O-methylguanosine-3'-phosphate
  modified_base 13: mod_base = OTHER; note = 2'-O-methyluridine-3'-phosphate
  modified_base 14: mod_base = OTHER; note = 2'-deoxy-2'-fluorocytidine-3'-phosphate
  modified_base 15: mod_base = OTHER; note = 2'-O-methyladenosine-3'-phosphate
  modified_base 16: mod_base = OTHER; note = 2'-deoxy-2'-fluorocytidine-3'-phosphate
  modified_base 17: mod_base = OTHER; note = 2'-O-methylcytidine-3'-phosphate
  modified_base 18: mod_base = OTHER; note = 2'-O-methyluridine-3'-phosphate
  modified_base 19: mod_base = OTHER; note = 2'-O-methyluridine-3'-phosphate
  modified_base 20: mod_base = OTHER; note = 2'-O-methyladenosine-3'-phosphate
  modified_base 21: mod_base = OTHER; note = 2'-O-methylcytidine-3'-phosphate
  modified_base 22: mod_base = OTHER; note = 2'-O-methyluridine-3'-phosphate
  modified_base 23: mod_base = OTHER; note = 2'-O-methyladenosine
ttcatagctatgtcaccttacta

SEQ ID NO: 5386 - RNA, 23 nt, synthetic construct
  source 1..23: mol_type = other RNA
  modified_base 1: mod_base = OTHER; note = 2'-O-methyluridine-3'-phosphate 5'phosphate
  modified_base 2: mod_base = OTHER; note = 2'-deoxy-2'-fluoroguanosine-3'-phosphate
  modified_base 3: mod_base = OTHER; note = 2'-O-methyluridine-3'-phosphate
  modified_base 4: mod_base = OTHER; note = 2'-O-methylcytidine-3'-phosphate
  modified_base 5: mod_base = OTHER; note = 2'-O-methyladenosine-3'-phosphate
  modified_base 6: mod_base = OTHER; note = 2'-deoxy-2'-fluorouridine-3'-phosphate
  modified_base 7: mod_base = OTHER; note = 2'-O-methyladenosine-3'-phosphate
  modified_base 8: mod_base = OTHER; note = 2'-O-methylguanosine-3'-phosphate
  modified_base 9: mod_base = OTHER; note = 2'-O-methylcytidine-3'-phosphate
  modified_base 10: mod_base = OTHER; note = 2'-O-methyluridine-3'-phosphate
  modified_base 11: mod_base = OTHER; note = 2'-O-methyladenosine-3'-phosphate
  modified_base 12: mod_base = OTHER; note = 2'-O-methyluridine-3'-phosphate
  modified_base 13: mod_base = OTHER; note = 2'-O-methylguanosine-3'-phosphate
  modified_base 14: mod_base = OTHER; note = 2'-deoxy-2'-fluorouridine-3'-phosphate
  modified_base 15: mod_base = OTHER; note = 2'-O-methylcytidine-3'-phosphate
  modified_base 16: mod_base = OTHER; note = 2'-deoxy-2'-fluoroadenosine-3'-phosphate
  modified_base 17: mod_base = OTHER; note = 2'-O-methylcytidine-3'-phosphate
  modified_base 18: mod_base = OTHER; note = 2'-O-methylcytidine-3'-phosphate
  modified_base 19: mod_base = OTHER; note = 2'-O-methyluridine-3'-phosphate
  modified_base 20: mod_base = OTHER; note = 2'-O-methyluridine-3'-phosphate
  modified_base 21: mod_base = OTHER; note = 2'-O-methyladenosine-3'-phosphate
  modified_base 22: mod_base = OTHER; note = 2'-O-methylcytidine-3'-phosphate
  modified_base 23: mod_base = OTHER; note = 2'-O-methyluridine
tgtcatagctatgtcaccttact

SEQ ID NO: 5387 - RNA, 23 nt, synthetic construct
  source 1..23: mol_type = other RNA
  modified_base 1: mod_base = OTHER; note = 2'-O-methyluridine-3'-phosphate 5'phosphate
  modified_base 2: mod_base = OTHER; note = 2'-deoxy-2'-fluorouridine-3'-phosphate
  modified_base 3: mod_base = OTHER; note = 2'-O-methylguanosine-3'-phosphate
  modified_base 4: mod_base = OTHER; note = 2'-O-methyluridine-3'-phosphate
  modified_base 5: mod_base = OTHER; note = 2'-O-methylcytidine-3'-phosphate
  modified_base 6: mod_base = OTHER; note = 2'-deoxy-2'-fluoroadenosine-3'-phosphate
  modified_base 7: mod_base = OTHER; note = 2'-O-methyluridine-3'-phosphate
  modified_base 8: mod_base = OTHER; note = 2'-O-methyladenosine-3'-phosphate
  modified_base 9: mod_base = OTHER; note = 2'-O-methylguanosine-3'-phosphate
  modified_base 10: mod_base = OTHER; note = 2'-O-methylcytidine-3'-phosphate
  modified_base 11: mod_base = OTHER; note = 2'-O-methyluridine-3'-phosphate
  modified_base 12: mod_base = OTHER; note = 2'-O-methyladenosine-3'-phosphate
  modified_base 13: mod_base = OTHER; note = 2'-O-methyluridine-3'-phosphate
  modified_base 14: mod_base = OTHER; note = 2'-deoxy-2'-fluoroguanosine-3'-phosphate
  modified_base 15: mod_base = OTHER; note = 2'-O-methyluridine-3'-phosphate
  modified_base 16: mod_base = OTHER; note = 2'-deoxy-2'-fluorocytidine-3'-phosphate
  modified_base 17: mod_base = OTHER; note = 2'-O-methyladenosine-3'-phosphate
  modified_base 18: mod_base = OTHER; note = 2'-O-methylcytidine-3'-phosphate
  modified_base 19: mod_base = OTHER; note = 2'-O-methylcytidine-3'-phosphate
  modified_base 20: mod_base = OTHER; note = 2'-O-methyluridine-3'-phosphate
  modified_base 21: mod_base = OTHER; note = 2'-O-methyluridine-3'-phosphate
  modified_base 22: mod_base = OTHER; note = 2'-O-methyladenosine-3'-phosphate
  modified_base 23: mod_base = OTHER; note = 2'-O-methylcytidine
ttgtcatagctatgtcaccttac

SEQ ID NO: 5388 - RNA, 23 nt, synthetic construct
  source 1..23: mol_type = other RNA
  modified_base 1: mod_base = OTHER; note = 2'-O-methyluridine-3'-phosphate 5'phosphate
  modified_base 2: mod_base = OTHER; note = 2'-deoxy-2'-fluoroadenosine-3'-phosphate
  modified_base 3: mod_base = OTHER; note = 2'-O-methyluridine-3'-phosphate
  modified_base 4: mod_base = OTHER; note = 2'-O-methylguanosine-3'-phosphate
  modified_base 5: mod_base = OTHER; note = 2'-O-methyluridine-3'-phosphate
  modified_base 6: mod_base = OTHER; note = 2'-deoxy-2'-fluorocytidine-3'-phosphate
  modified_base 7: mod_base = OTHER; note = 2'-O-methyladenosine-3'-phosphate
  modified_base 8: mod_base = OTHER; note = 2'-O-methyluridine-3'-phosphate
  modified_base 9: mod_base = OTHER; note = 2'-O-methyladenosine-3'-phosphate
  modified_base 10: mod_base = OTHER; note = 2'-O-methylguanosine-3'-phosphate
  modified_base 11: mod_base = OTHER; note = 2'-O-methylcytidine-3'-phosphate
  modified_base 12: mod_base = OTHER; note = 2'-O-methyluridine-3'-phosphate
  modified_base 13: mod_base = OTHER; note = 2'-O-methyladenosine-3'-phosphate
  modified_base 14: mod_base = OTHER; note = 2'-deoxy-2'-fluorouridine-3'-phosphate
  modified_base 15: mod_base = OTHER; note = 2'-O-methylguanosine-3'-phosphate
  modified_base 16: mod_base = OTHER; note = 2'-deoxy-2'-fluorouridine-3'-phosphate
  modified_base 17: mod_base = OTHER; note = 2'-O-methylcytidine-3'-phosphate
  modified_base 18: mod_base = OTHER; note = 2'-O-methyladenosine-3'-phosphate
  modified_base 19: mod_base = OTHER; note = 2'-O-methylcytidine-3'-phosphate
  modified_base 20: mod_base = OTHER; note = 2'-O-methylcytidine-3'-phosphate
  modified_base 21: mod_base = OTHER; note = 2'-O-methyluridine-3'-phosphate
  modified_base 22: mod_base = OTHER; note = 2'-O-methyluridine-3'-phosphate
  modified_base 23: mod_base = OTHER; note = 2'-O-methyladenosine
tatgtcatagctatgtcacctta

SEQ ID NO: 5389 - RNA, 23 nt, synthetic construct
  source 1..23: mol_type = other RNA
  modified_base 1: mod_base = OTHER; note = 2'-O-methyluridine-3'-phosphate 5'phosphate
  modified_base 2: mod_base = OTHER; note = 2'-deoxy-2'-fluoroadenosine-3'-phosphate
  modified_base 3: mod_base = OTHER; note = 2'-O-methyladenosine-3'-phosphate
  modified_base 4: mod_base = OTHER; note = 2'-O-methyluridine-3'-phosphate
  modified_base 5: mod_base = OTHER; note = 2'-O-methylguanosine-3'-phosphate
  modified_base 6: mod_base = OTHER; note = 2'-deoxy-2'-fluorouridine-3'-phosphate
  modified_base 7: mod_base = OTHER; note = 2'-O-methylcytidine-3'-phosphate
  modified_base 8: mod_base = OTHER; note = 2'-O-methyladenosine-3'-phosphate
  modified_base 9: mod_base = OTHER; note = 2'-O-methyluridine-3'-phosphate
  modified_base 10: mod_base = OTHER; note = 2'-O-methyladenosine-3'-phosphate
  modified_base 11: mod_base = OTHER; note = 2'-O-methylguanosine-3'-phosphate
  modified_base 12: mod_base = OTHER; note = 2'-O-methylcytidine-3'-phosphate
  modified_base 13: mod_base = OTHER; note = 2'-O-methyluridine-3'-phosphate
  modified_base 14: mod_base = OTHER; note = 2'-deoxy-2'-fluoroadenosine-3'-phosphate
  modified_base 15: mod_base = OTHER; note = 2'-O-methyluridine-3'-phosphate
  modified_base 16: mod_base = OTHER; note = 2'-deoxy-2'-fluoroguanosine-3'-phosphate
  modified_base 17: mod_base = OTHER; note = 2'-O-methyluridine-3'-phosphate
  modified_base 18: mod_base = OTHER; note = 2'-O-methylcytidine-3'-phosphate
  modified_base 19: mod_base = OTHER; note = 2'-O-methyladenosine-3'-phosphate
  modified_base 20: mod_base = OTHER; note = 2'-O-methylcytidine-3'-phosphate
  modified_base 21: mod_base = OTHER; note = 2'-O-methylcytidine-3'-phosphate
  modified_base 22: mod_base = OTHER; note = 2'-O-methyluridine-3'-phosphate
  modified_base 23: mod_base = OTHER; note = 2'-O-methyluridine
taatgtcatagctatgtcacctt

SEQ ID NO: 5390 - RNA, 23 nt, synthetic construct
  source 1..23: mol_type = other RNA
  modified_base 1: mod_base = OTHER; note = 2'-O-methyluridine-3'-phosphate 5'phosphate
  modified_base 2: mod_base = OTHER; note = 2'-deoxy-2'-fluoroadenosine-3'-phosphate
  modified_base 3: mod_base = OTHER; note = 2'-O-methyladenosine-3'-phosphate
  modified_base 4: mod_base = OTHER; note = 2'-O-methyladenosine-3'-phosphate
  modified_base 5: mod_base = OTHER; note = 2'-O-methyluridine-3'-phosphate
  modified_base 6: mod_base = OTHER; note = 2'-deoxy-2'-fluoroguanosine-3'-phosphate
  modified_base 7: mod_base = OTHER; note = 2'-O-methyluridine-3'-phosphate
  modified_base 8: mod_base = OTHER; note = 2'-O-methylcytidine-3'-phosphate
  modified_base 9: mod_base = OTHER; note = 2'-O-methyladenosine-3'-phosphate
  modified_base 10: mod_base = OTHER; note = 2'-O-methyluridine-3'-phosphate
  modified_base 11: mod_base = OTHER; note = 2'-O-methyladenosine-3'-phosphate
  modified_base 12: mod_base = OTHER; note = 2'-O-methylguanosine-3'-phosphate
  modified_base 13: mod_base = OTHER; note = 2'-O-methylcytidine-3'-phosphate
  modified_base 14: mod_base = OTHER; note = 2'-deoxy-2'-fluorouridine-3'-phosphate
  modified_base 15: mod_base = OTHER; note = 2'-O-methyladenosine-3'-phosphate
  modified_base 16: mod_base = OTHER; note = 2'-deoxy-2'-fluorouridine-3'-phosphate
  modified_base 17: mod_base = OTHER; note = 2'-O-methylguanosine-3'-phosphate
  modified_base 18: mod_base = OTHER; note = 2'-O-methyluridine-3'-phosphate
  modified_base 19: mod_base = OTHER; note = 2'-O-methylcytidine-3'-phosphate
  modified_base 20: mod_base = OTHER; note = 2'-O-methyladenosine-3'-phosphate
  modified_base 21: mod_base = OTHER; note = 2'-O-methylcytidine-3'-phosphate
  modified_base 22: mod_base = OTHER; note = 2'-O-methylcytidine-3'-phosphate
  modified_base 23: mod_base = OTHER; note = 2'-O-methyluridine
taaatgtcatagctatgtcacct

SEQ ID NO: 5391 - RNA, 23 nt, synthetic construct
  source 1..23: mol_type = other RNA
  modified_base 1: mod_base = OTHER; note = 2'-O-methyluridine-3'-phosphate 5'phosphate
  modified_base 2: mod_base = OTHER; note = 2'-deoxy-2'-fluorocytidine-3'-phosphate
  modified_base 3: mod_base = OTHER; note = 2'-O-methyladenosine-3'-phosphate
  modified_base 4: mod_base = OTHER; note = 2'-O-methyladenosine-3'-phosphate
  modified_base 5: mod_base = OTHER; note = 2'-O-methyladenosine-3'-phosphate
  modified_base 6: mod_base = OTHER; note = 2'-deoxy-2'-fluorouridine-3'-phosphate
  modified_base 7: mod_base = OTHER; note = 2'-O-methylguanosine-3'-phosphate
  modified_base 8: mod_base = OTHER; note = 2'-O-methyluridine-3'-phosphate
  modified_base 9: mod_base = OTHER; note = 2'-O-methylcytidine-3'-phosphate
  modified_base 10: mod_base = OTHER; note = 2'-O-methyladenosine-3'-phosphate
  modified_base 11: mod_base = OTHER; note = 2'-O-methyluridine-3'-phosphate
  modified_base 12: mod_base = OTHER; note = 2'-O-methyladenosine-3'-phosphate
  modified_base 13: mod_base = OTHER; note = 2'-O-methylguanosine-3'-phosphate
  modified_base 14: mod_base = OTHER; note = 2'-deoxy-2'-fluorocytidine-3'-phosphate
  modified_base 15: mod_base = OTHER; note = 2'-O-methyluridine-3'-phosphate
  modified_base 16: mod_base = OTHER; note = 2'-deoxy-2'-fluoroadenosine-3'-phosphate
  modified_base 17: mod_base = OTHER; note = 2'-O-methyluridine-3'-phosphate
  modified_base 18: mod_base = OTHER; note = 2'-O-methylguanosine-3'-phosphate
  modified_base 19: mod_base = OTHER; note = 2'-O-methyluridine-3'-phosphate
  modified_base 20: mod_base = OTHER; note = 2'-O-methylcytidine-3'-phosphate
  modified_base 21: mod_base = OTHER; note = 2'-O-methyladenosine-3'-phosphate
  modified_base 22: mod_base = OTHER; note = 2'-O-methylcytidine-3'-phosphate
  modified_base 23: mod_base = OTHER; note = 2'-O-methylcytidine
tcaaatgtcatagctatgtcacc

SEQ ID NO: 5392 - RNA, 23 nt, synthetic construct
  source 1..23: mol_type = other RNA
  modified_base 1: mod_base = OTHER; note = 2'-O-methyluridine-3'-phosphate 5'phosphate
  modified_base 2: mod_base = OTHER; note = 2'-deoxy-2'-fluoroadenosine-3'-phosphate
  modified_base 3: mod_base = OTHER; note = 2'-O-methyladenosine-3'-phosphate
  modified_base 4: mod_base = OTHER; note = 2'-O-methylcytidine-3'-phosphate
  modified_base 5: mod_base = OTHER; note = 2'-O-methyladenosine-3'-phosphate
  modified_base 6: mod_base = OTHER; note = 2'-deoxy-2'-fluoroadenosine-3'-phosphate
  modified_base 7: mod_base = OTHER; note = 2'-O-methyladenosine-3'-phosphate
  modified_base 8: mod_base = OTHER; note = 2'-O-methyluridine-3'-phosphate
  modified_base 9: mod_base = OTHER; note = 2'-O-methylguanosine-3'-phosphate
  modified_base 10: mod_base = OTHER; note = 2'-O-methyluridine-3'-phosphate
  modified_base 11: mod_base = OTHER; note = 2'-O-methylcytidine-3'-phosphate
  modified_base 12: mod_base = OTHER; note = 2'-O-methyladenosine-3'-phosphate
  modified_base 13: mod_base = OTHER; note = 2'-O-methyluridine-3'-phosphate
  modified_base 14: mod_base = OTHER; note = 2'-deoxy-2'-fluoroadenosine-3'-phosphate
  modified_base 15: mod_base = OTHER; note = 2'-O-methylguanosine-3'-phosphate
  modified_base 16: mod_base = OTHER; note = 2'-deoxy-2'-fluorocytidine-3'-phosphate
  modified_base 17: mod_base = OTHER; note = 2'-O-methyluridine-3'-phosphate
  modified_base 18: mod_base = OTHER; note = 2'-O-methyladenosine-3'-phosphate
  modified_base 19: mod_base = OTHER; note = 2'-O-methyluridine-3'-phosphate
  modified_base 20: mod_base = OTHER; note = 2'-O-methylguanosine-3'-phosphate
  modified_base 21: mod_base = OTHER; note = 2'-O-methyluridine-3'-phosphate
  modified_base 22: mod_base = OTHER; note = 2'-O-methylcytidine-3'-phosphate
  modified_base 23: mod_base = OTHER; note = 2'-O-methyladenosine
taacaaatgtcatagctatgtca

SEQ ID NO: 5393 - RNA, 23 nt, synthetic construct
  source 1..23: mol_type = other RNA
  modified_base 1: mod_base = OTHER; note = 2'-O-methyluridine-3'-phosphate 5'phosphate
  modified_base 2: mod_base = OTHER; note = 2'-deoxy-2'-fluorouridine-3'-phosphate
  modified_base 3: mod_base = OTHER; note = 2'-O-methyladenosine-3'-phosphate
  modified_base 4: mod_base = OTHER; note = 2'-O-methyladenosine-3'-phosphate
  modified_base 5: mod_base = OTHER; note = 2'-O-methylcytidine-3'-phosphate
  modified_base 6: mod_base = OTHER; note = 2'-deoxy-2'-fluoroadenosine-3'-phosphate
  modified_base 7: mod_base = OTHER; note = 2'-O-methyladenosine-3'-phosphate
  modified_base 8: mod_base = OTHER; note = 2'-O-methyladenosine-3'-phosphate
  modified_base 9: mod_base = OTHER; note = 2'-O-methyluridine-3'-phosphate
  modified_base 10: mod_base = OTHER; note = 2'-O-methylguanosine-3'-phosphate
  modified_base 11: mod_base = OTHER; note = 2'-O-methyluridine-3'-phosphate
  modified_base 12: mod_base = OTHER; note = 2'-O-methylcytidine-3'-phosphate
  modified_base 13: mod_base = OTHER; note = 2'-O-methyladenosine-3'-phosphate
  modified_base 14: mod_base = OTHER; note = 2'-deoxy-2'-fluorouridine-3'-phosphate
  modified_base 15: mod_base = OTHER; note = 2'-O-methyladenosine-3'-phosphate
  modified_base 16: mod_base = OTHER; note = 2'-deoxy-2'-fluoroguanosine-3'-phosphate
  modified_base 17: mod_base = OTHER; note = 2'-O-methylcytidine-3'-phosphate
  modified_base 18: mod_base = OTHER; note = 2'-O-methyluridine-3'-phosphate
  modified_base 19: mod_base = OTHER; note = 2'-O-methyladenosine-3'-phosphate
  modified_base 20: mod_base = OTHER; note = 2'-O-methyluridine-3'-phosphate
  modified_base 21: mod_base = OTHER; note = 2'-O-methylguanosine-3'-phosphate
  modified_base 22: mod_base = OTHER; note = 2'-O-methyluridine-3'-phosphate
  modified_base 23: mod_base = OTHER; note = 2'-O-methylcytidine
ttaacaaatgtcatagctatgtc

SEQ ID NO: 5394 - RNA, 23 nt, synthetic construct
  source 1..23: mol_type = other RNA
  modified_base 1: mod_base = OTHER; note = 2'-O-methyluridine-3'-phosphate 5'phosphate
  modified_base 2: mod_base = OTHER; note = 2'-deoxy-2'-fluorouridine-3'-phosphate
  modified_base 3: mod_base = OTHER; note = 2'-O-methyluridine-3'-phosphate
  modified_base 4: mod_base = OTHER; note = 2'-O-methyladenosine-3'-phosphate
  modified_base 5: mod_base = OTHER; note = 2'-O-methyladenosine-3'-phosphate
  modified_base 6: mod_base = OTHER; note = 2'-deoxy-2'-fluorocytidine-3'-phosphate
  modified_base 7: mod_base = OTHER; note = 2'-O-methyladenosine-3'-phosphate
  modified_base 8: mod_base = OTHER; note = 2'-O-methyladenosine-3'-phosphate
  modified_base 9: mod_base = OTHER; note = 2'-O-methyladenosine-3'-phosphate
  modified_base 10: mod_base = OTHER; note = 2'-O-methyluridine-3'-phosphate
  modified_base 11: mod_base = OTHER; note = 2'-O-methylguanosine-3'-phosphate
  modified_base 12: mod_base = OTHER; note = 2'-O-methyluridine-3'-phosphate
  modified_base 13: mod_base = OTHER; note = 2'-O-methylcytidine-3'-phosphate
  modified_base 14: mod_base = OTHER; note = 2'-deoxy-2'-fluoroadenosine-3'-phosphate
  modified_base 15: mod_base = OTHER; note = 2'-O-methyluridine-3'-phosphate
  modified_base 16: mod_base = OTHER; note = 2'-deoxy-2'-fluoroadenosine-3'-phosphate
  modified_base 17: mod_base = OTHER; note = 2'-O-methylguanosine-3'-phosphate
  modified_base 18: mod_base = OTHER; note = 2'-O-methylcytidine-3'-phosphate
  modified_base 19: mod_base = OTHER; note = 2'-O-methyluridine-3'-phosphate
  modified_base 20: mod_base = OTHER; note = 2'-O-methyladenosine-3'-phosphate
  modified_base 21: mod_base = OTHER; note = 2'-O-methyluridine-3'-phosphate
  modified_base 22: mod_base = OTHER; note = 2'-O-methylguanosine-3'-phosphate
  modified_base 23: mod_base = OTHER; note = 2'-O-methyluridine
tttaacaaatgtcatagctatgt

SEQ ID NO: 5395 - RNA, 23 nt, synthetic construct
  source 1..23: mol_type = other RNA
  modified_base 1: mod_base = OTHER; note = 2'-O-methyluridine-3'-phosphate 5'phosphate
  modified_base 2: mod_base = OTHER; note = 2'-deoxy-2'-fluorouridine-3'-phosphate
  modified_base 3: mod_base = OTHER; note = 2'-O-methyluridine-3'-phosphate
  modified_base 4: mod_base = OTHER; note = 2'-O-methyluridine-3'-phosphate
  modified_base 5: mod_base = OTHER; note = 2'-O-methyladenosine-3'-phosphate
  modified_base 6: mod_base = OTHER; note = 2'-deoxy-2'-fluoroadenosine-3'-phosphate
  modified_base 7: mod_base = OTHER; note = 2'-O-methylcytidine-3'-phosphate
  modified_base 8: mod_base = OTHER; note = 2'-O-methyladenosine-3'-phosphate
  modified_base 9: mod_base = OTHER; note = 2'-O-methyladenosine-3'-phosphate
  modified_base 10: mod_base = OTHER; note = 2'-O-methyladenosine-3'-phosphate
  modified_base 11: mod_base = OTHER; note = 2'-O-methyluridine-3'-phosphate
  modified_base 12: mod_base = OTHER; note = 2'-O-methylguanosine-3'-phosphate
  modified_base 13: mod_base = OTHER; note = 2'-O-methyluridine-3'-phosphate
  modified_base 14: mod_base = OTHER; note = 2'-deoxy-2'-fluorocytidine-3'-phosphate
  modified_base 15: mod_base = OTHER; note = 2'-O-methyladenosine-3'-phosphate
  modified_base 16: mod_base = OTHER; note = 2'-deoxy-2'-fluorouridine-3'-phosphate
  modified_base 17: mod_base = OTHER; note = 2'-O-methyladenosine-3'-phosphate
  modified_base 18: mod_base = OTHER; note = 2'-O-methylguanosine-3'-phosphate
  modified_base 19: mod_base = OTHER; note = 2'-O-methylcytidine-3'-phosphate
  modified_base 20: mod_base = OTHER; note = 2'-O-methyluridine-3'-phosphate
  modified_base 21: mod_base = OTHER; note = 2'-O-methyladenosine-3'-phosphate
  modified_base 22: mod_base = OTHER; note = 2'-O-methyluridine-3'-phosphate
  modified_base 23: mod_base = OTHER; note = 2'-O-methylguanosine
ttttaacaaatgtcatagctatg

SEQ ID NO: 5396 - RNA, 23 nt, synthetic construct
  source 1..23: mol_type = other RNA
  modified_base 1: mod_base = OTHER; note = 2'-O-methyluridine-3'-phosphate 5'phosphate
  modified_base 2: mod_base = OTHER; note = 2'-deoxy-2'-fluorouridine-3'-phosphate
  modified_base 3: mod_base = OTHER; note = 2'-O-methyluridine-3'-phosphate
  modified_base 4: mod_base = OTHER; note = 2'-O-methyluridine-3'-phosphate
  modified_base 5: mod_base = OTHER; note = 2'-O-methyluridine-3'-phosphate
  modified_base 6: mod_base = OTHER; note = 2'-deoxy-2'-fluoroadenosine-3'-phosphate
  modified_base 7: mod_base = OTHER; note = 2'-O-methyladenosine-3'-phosphate
  modified_base 8: mod_base = OTHER; note = 2'-O-methylcytidine-3'-phosphate
  modified_base 9: mod_base = OTHER; note = 2'-O-methyladenosine-3'-phosphate
  modified_base 10: mod_base = OTHER; note = 2'-O-methyladenosine-3'-phosphate
  modified_base 11: mod_base = OTHER; note = 2'-O-methyladenosine-3'-phosphate
  modified_base 12: mod_base = OTHER; note = 2'-O-methyluridine-3'-phosphate
  modified_base 13: mod_base = OTHER; note = 2'-O-methylguanosine-3'-phosphate
  modified_base 14: mod_base = OTHER; note = 2'-deoxy-2'-fluorouridine-3'-phosphate
  modified_base 15: mod_base = OTHER; note = 2'-O-methylcytidine-3'-phosphate
  modified_base 16: mod_base = OTHER; note = 2'-deoxy-2'-fluoroadenosine-3'-phosphate
  modified_base 17: mod_base = OTHER; note = 2'-O-methyluridine-3'-phosphate
  modified_base 18: mod_base = OTHER; note = 2'-O-methyladenosine-3'-phosphate
  modified_base 19: mod_base = OTHER; note = 2'-O-methylguanosine-3'-phosphate
  modified_base 20: mod_base = OTHER; note = 2'-O-methylcytidine-3'-phosphate
  modified_base 21: mod_base = OTHER; note = 2'-O-methyluridine-3'-phosphate
  modified_base 22: mod_base = OTHER; note = 2'-O-methyladenosine-3'-phosphate
  modified_base 23: mod_base = OTHER; note = 2'-O-methyluridine
tttttaacaaatgtcatagctat

SEQ ID NO: 5397 - RNA, 23 nt, synthetic construct
  source 1..23: mol_type = other RNA
  modified_base 1: mod_base = OTHER; note = 2'-O-methyluridine-3'-phosphate 5'phosphate
  modified_base 2: mod_base = OTHER; note = 2'-deoxy-2'-fluorouridine-3'-phosphate
  modified_base 3: mod_base = OTHER; note = 2'-O-methyluridine-3'-phosphate
  modified_base 4: mod_base = OTHER; note = 2'-O-methyluridine-3'-phosphate
  modified_base 5: mod_base = OTHER; note = 2'-O-methyluridine-3'-phosphate
  modified_base 6: mod_base = OTHER; note = 2'-deoxy-2'-fluorouridine-3'-phosphate
  modified_base 7: mod_base = OTHER; note = 2'-O-methyladenosine-3'-phosphate
  modified_base 8: mod_base = OTHER; note = 2'-O-methyladenosine-3'-phosphate
  modified_base 9: mod_base = OTHER; note = 2'-O-methylcytidine-3'-phosphate
  modified_base 10: mod_base = OTHER; note = 2'-O-methyladenosine-3'-phosphate
  modified_base 11: mod_base = OTHER; note = 2'-O-methyladenosine-3'-phosphate
  modified_base 12: mod_base = OTHER; note = 2'-O-methyladenosine-3'-phosphate
  modified_base 13: mod_base = OTHER; note = 2'-O-methyluridine-3'-phosphate
  modified_base 14: mod_base = OTHER; note = 2'-deoxy-2'-fluoroguanosine-3'-phosphate
  modified_base 15: mod_base = OTHER; note = 2'-O-methyluridine-3'-phosphate
  modified_base 16: mod_base = OTHER; note = 2'-deoxy-2'-fluorocytidine-3'-phosphate
  modified_base 17: mod_base = OTHER; note = 2'-O-methyladenosine-3'-phosphate
  modified_base 18: mod_base = OTHER; note = 2'-O-methyluridine-3'-phosphate
  modified_base 19: mod_base = OTHER; note = 2'-O-methyladenosine-3'-phosphate
  modified_base 20: mod_base = OTHER; note = 2'-O-methylguanosine-3'-phosphate
  modified_base 21: mod_base = OTHER; note = 2'-O-methylcytidine-3'-phosphate
  modified_base 22: mod_base = OTHER; note = 2'-O-methyluridine-3'-phosphate
  modified_base 23: mod_base = OTHER; note = 2'-O-methyladenosine
ttttttaacaaatgtcatagcta

SEQ ID NO: 5398 - RNA, 23 nt, synthetic construct
  source 1..23: mol_type = other RNA
  modified_base 1: mod_base = OTHER; note = 2'-O-methyluridine-3'-phosphate 5'phosphate
  modified_base 2: mod_base = OTHER; note = 2'-deoxy-2'-fluoroadenosine-3'-phosphate
  modified_base 3: mod_base = OTHER; note = 2'-O-methyluridine-3'-phosphate
  modified_base 4: mod_base = OTHER; note = 2'-O-methyluridine-3'-phosphate
  modified_base 5: mod_base = OTHER; note = 2'-O-methyluridine-3'-phosphate
  modified_base 6: mod_base = OTHER; note = 2'-deoxy-2'-fluorouridine-3'-phosphate
  modified_base 7: mod_base = OTHER; note = 2'-O-methyluridine-3'-phosphate
  modified_base 8: mod_base = OTHER; note = 2'-O-methyladenosine-3'-phosphate
  modified_base 9: mod_base = OTHER; note = 2'-O-methyladenosine-3'-phosphate
  modified_base 10: mod_base = OTHER; note = 2'-O-methylcytidine-3'-phosphate
  modified_base 11: mod_base = OTHER; note = 2'-O-methyladenosine-3'-phosphate
  modified_base 12: mod_base = OTHER; note = 2'-O-methyladenosine-3'-phosphate
  modified_base 13: mod_base = OTHER; note = 2'-O-methyladenosine-3'-phosphate
  modified_base 14: mod_base = OTHER; note = 2'-deoxy-2'-fluorouridine-3'-phosphate
  modified_base 15: mod_base = OTHER; note = 2'-O-methylguanosine-3'-phosphate
  modified_base 16: mod_base = OTHER; note = 2'-deoxy-2'-fluorouridine-3'-phosphate
  modified_base 17: mod_base = OTHER; note = 2'-O-methylcytidine-3'-phosphate
  modified_base 18: mod_base = OTHER; note = 2'-O-methyladenosine-3'-phosphate
  modified_base 19: mod_base = OTHER; note = 2'-O-methyluridine-3'-phosphate
  modified_base 20: mod_base = OTHER; note = 2'-O-methyladenosine-3'-phosphate
  modified_base 21: mod_base = OTHER; note = 2'-O-methylguanosine-3'-phosphate
  modified_base 22: mod_base = OTHER; note = 2'-O-methylcytidine-3'-phosphate
  modified_base 23: mod_base = OTHER; note = 2'-O-methyluridine
tatttttaacaaatgtcatagct

SEQ ID NO: 5399 - RNA, 23 nt, synthetic construct
  source 1..23: mol_type = other RNA
  modified_base 1: mod_base = OTHER; note = 2'-O-methyluridine-3'-phosphate 5'phosphate
  modified_base 2: mod_base = OTHER; note = 2'-deoxy-2'-fluorouridine-3'-phosphate
  modified_base 3: mod_base = OTHER; note = 2'-O-methyladenosine-3'-phosphate
  modified_base 4: mod_base = OTHER; note = 2'-O-methyluridine-3'-phosphate
  modified_base 5: mod_base = OTHER; note = 2'-O-methyluridine-3'-phosphate
  modified_base 6: mod_base = OTHER; note = 2'-deoxy-2'-fluorouridine-3'-phosphate
  modified_base 7: mod_base = OTHER; note = 2'-O-methyluridine-3'-phosphate
  modified_base 8: mod_base = OTHER; note = 2'-O-methyluridine-3'-phosphate
  modified_base 9: mod_base = OTHER; note = 2'-O-methyladenosine-3'-phosphate
  modified_base 10: mod_base = OTHER; note = 2'-O-methyladenosine-3'-phosphate
  modified_base 11: mod_base = OTHER; note = 2'-O-methylcytidine-3'-phosphate
  modified_base 12: mod_base = OTHER; note = 2'-O-methyladenosine-3'-phosphate
  modified_base 13: mod_base = OTHER; note = 2'-O-methyladenosine-3'-phosphate
  modified_base 14: mod_base = OTHER; note = 2'-deoxy-2'-fluoroadenosine-3'-phosphate
  modified_base 15: mod_base = OTHER; note = 2'-O-methyluridine-3'-phosphate
  modified_base 16: mod_base = OTHER; note = 2'-deoxy-2'-fluoroguanosine-3'-phosphate
  modified_base 17: mod_base = OTHER; note = 2'-O-methyluridine-3'-phosphate
  modified_base 18: mod_base = OTHER; note = 2'-O-methylcytidine-3'-phosphate
  modified_base 19: mod_base = OTHER; note = 2'-O-methyladenosine-3'-phosphate
  modified_base 20: mod_base = OTHER; note = 2'-O-methyluridine-3'-phosphate
  modified_base 21: mod_base = OTHER; note = 2'-O-methyladenosine-3'-phosphate
  modified_base 22: mod_base = OTHER; note = 2'-O-methylguanosine-3'-phosphate
  modified_base 23: mod_base = OTHER; note = 2'-O-methylcytidine
ttatttttaacaaatgtcatagc

SEQ ID NO: 5400 - RNA, 23 nt, synthetic construct
  source 1..23: mol_type = other RNA
  modified_base 1: mod_base = OTHER; note = 2'-O-methyluridine-3'-phosphate 5'phosphate
  modified_base 2: mod_base = OTHER; note = 2'-deoxy-2'-fluorouridine-3'-phosphate
  modified_base 3: mod_base = OTHER; note = 2'-O-methyluridine-3'-phosphate
  modified_base 4: mod_base = OTHER; note = 2'-O-methyladenosine-3'-phosphate
  modified_base 5: mod_base = OTHER; note = 2'-O-methyluridine-3'-phosphate
  modified_base 6: mod_base = OTHER; note = 2'-deoxy-2'-fluorouridine-3'-phosphate
  modified_base 7: mod_base = OTHER; note = 2'-O-methyluridine-3'-phosphate
  modified_base 8: mod_base = OTHER; note = 2'-O-methyluridine-3'-phosphate
  modified_base 9: mod_base = OTHER; note = 2'-O-methyluridine-3'-phosphate
  modified_base 10: mod_base = OTHER; note = 2'-O-methyladenosine-3'-phosphate
  modified_base 11: mod_base = OTHER; note = 2'-O-methyladenosine-3'-phosphate
  modified_base 12: mod_base = OTHER; note = 2'-O-methylcytidine-3'-phosphate
  modified_base 13: mod_base = OTHER; note = 2'-O-methyladenosine-3'-phosphate
  modified_base 14: mod_base = OTHER; note = 2'-deoxy-2'-fluoroadenosine-3'-phosphate
  modified_base 15: mod_base = OTHER; note = 2'-O-methyladenosine-3'-phosphate
  modified_base 16: mod_base = OTHER; note = 2'-deoxy-2'-fluorouridine-3'-phosphate
  modified_base 17: mod_base = OTHER; note = 2'-O-methylguanosine-3'-phosphate
  modified_base 18: mod_base = OTHER; note = 2'-O-methyluridine-3'-phosphate
  modified_base 19: mod_base = OTHER; note = 2'-O-methylcytidine-3'-phosphate
  modified_base 20: mod_base = OTHER; note = 2'-O-methyladenosine-3'-phosphate
  modified_base 21: mod_base = OTHER; note = 2'-O-methyluridine-3'-phosphate
  modified_base 22: mod_base = OTHER; note = 2'-O-methyladenosine-3'-phosphate
  modified_base 23: mod_base = OTHER; note = 2'-O-methylguanosine
tttatttttaacaaatgtcatag

SEQ ID NO: 5401 - RNA, 23 nt, synthetic construct
  source 1..23: mol_type = other RNA
  modified_base 1: mod_base = OTHER; note = 2'-O-methyluridine-3'-phosphate 5'phosphate
  modified_base 2: mod_base = OTHER; note = 2'-deoxy-2'-fluorouridine-3'-phosphate
  modified_base 3: mod_base = OTHER; note = 2'-O-methyluridine-3'-phosphate
  modified_base 4: mod_base = OTHER; note = 2'-O-methyluridine-3'-phosphate
  modified_base 5: mod_base = OTHER; note = 2'-O-methyladenosine-3'-phosphate
  modified_base 6: mod_base = OTHER; note = 2'-deoxy-2'-fluorouridine-3'-phosphate
  modified_base 7: mod_base = OTHER; note = 2'-O-methyluridine-3'-phosphate
  modified_base 8: mod_base = OTHER; note = 2'-O-methyluridine-3'-phosphate
  modified_base 9: mod_base = OTHER; note = 2'-O-methyluridine-3'-phosphate
  modified_base 10: mod_base = OTHER; note = 2'-O-methyluridine-3'-phosphate
  modified_base 11: mod_base = OTHER; note = 2'-O-methyladenosine-3'-phosphate
  modified_base 12: mod_base = OTHER; note = 2'-O-methyladenosine-3'-phosphate
  modified_base 13: mod_base = OTHER; note = 2'-O-methylcytidine-3'-phosphate
  modified_base 14: mod_base = OTHER; note = 2'-deoxy-2'-fluoroadenosine-3'-phosphate
  modified_base 15: mod_base = OTHER; note = 2'-O-methyladenosine-3'-phosphate
  modified_base 16: mod_base = OTHER; note = 2'-deoxy-2'-fluoroadenosine-3'-phosphate
  modified_base 17: mod_base = OTHER; note = 2'-O-methyluridine-3'-phosphate
  modified_base 18: mod_base = OTHER; note = 2'-O-methylguanosine-3'-phosphate
  modified_base 19: mod_base = OTHER; note = 2'-O-methyluridine-3'-phosphate
  modified_base 20: mod_base = OTHER; note = 2'-O-methylcytidine-3'-phosphate
  modified_base 21: mod_base = OTHER; note = 2'-O-methyladenosine-3'-phosphate
  modified_base 22: mod_base = OTHER; note = 2'-O-methyluridine-3'-phosphate
  modified_base 23: mod_base = OTHER; note = 2'-O-methyladenosine
ttttatttttaacaaatgtcata

SEQ ID NO: 5402 - RNA, 23 nt, synthetic construct
  source 1..23: mol_type = other RNA
  modified_base 1: mod_base = OTHER; note = 2'-O-methyluridine-3'-phosphate 5'phosphate
  modified_base 2: mod_base = OTHER; note = 2'-deoxy-2'-fluoroguanosine-3'-phosphate
  modified_base 3: mod_base = OTHER; note = 2'-O-methyluridine-3'-phosphate
  modified_base 4: mod_base = OTHER; note = 2'-O-methyluridine-3'-phosphate
  modified_base 5: mod_base = OTHER; note = 2'-O-methyluridine-3'-phosphate
  modified_base 6: mod_base = OTHER; note = 2'-deoxy-2'-fluoroadenosine-3'-phosphate
  modified_base 7: mod_base = OTHER; note = 2'-O-methyluridine-3'-phosphate
  modified_base 8: mod_base = OTHER; note = 2'-O-methyluridine-3'-phosphate
  modified_base 9: mod_base = OTHER; note = 2'-O-methyluridine-3'-phosphate
  modified_base 10: mod_base = OTHER; note = 2'-O-methyluridine-3'-phosphate
  modified_base 11: mod_base = OTHER; note = 2'-O-methyluridine-3'-phosphate
  modified_base 12: mod_base = OTHER; note = 2'-O-methyladenosine-3'-phosphate
  modified_base 13: mod_base = OTHER; note = 2'-O-methyladenosine-3'-phosphate
  modified_base 14: mod_base = OTHER; note = 2'-deoxy-2'-fluorocytidine-3'-phosphate
  modified_base 15: mod_base = OTHER; note = 2'-O-methyladenosine-3'-phosphate
  modified_base 16: mod_base = OTHER; note = 2'-deoxy-2'-fluoroadenosine-3'-phosphate
  modified_base 17: mod_base = OTHER; note = 2'-O-methyladenosine-3'-phosphate
  modified_base 18: mod_base = OTHER; note = 2'-O-methyluridine-3'-phosphate
  modified_base 19: mod_base = OTHER; note = 2'-O-methylguanosine-3'-phosphate
  modified_base 20: mod_base = OTHER; note = 2'-O-methyluridine-3'-phosphate
  modified_base 21: mod_base = OTHER; note = 2'-O-methylcytidine-3'-phosphate
  modified_base 22: mod_base = OTHER; note = 2'-O-methyladenosine-3'-phosphate
  modified_base 23: mod_base = OTHER; note = 2'-O-methyluridine
tgtttatttttaacaaatgtcat

SEQ ID NO: 5403 - RNA, 23 nt, synthetic construct
  source 1..23: mol_type = other RNA
  modified_base 1: mod_base = OTHER; note = 2'-O-methyluridine-3'-phosphate 5'phosphate
  modified_base 2: mod_base = OTHER; note = 2'-deoxy-2'-fluoroadenosine-3'-phosphate
  modified_base 3: mod_base = OTHER; note = 2'-O-methylguanosine-3'-phosphate
  modified_base 4: mod_base = OTHER; note = 2'-O-methyluridine-3'-phosphate
  modified_base 5: mod_base = OTHER; note = 2'-O-methyluridine-3'-phosphate
  modified_base 6: mod_base = OTHER; note = 2'-deoxy-2'-fluorouridine-3'-phosphate
  modified_base 7: mod_base = OTHER; note = 2'-O-methyladenosine-3'-phosphate
  modified_base 8: mod_base = OTHER; note = 2'-O-methyluridine-3'-phosphate
  modified_base 9: mod_base = OTHER; note = 2'-O-methyluridine-3'-phosphate
  modified_base 10: mod_base = OTHER; note = 2'-O-methyluridine-3'-phosphate
  modified_base 11: mod_base = OTHER; note = 2'-O-methyluridine-3'-phosphate
  modified_base 12: mod_base = OTHER; note = 2'-O-methyluridine-3'-phosphate
  modified_base 13: mod_base = OTHER; note = 2'-O-methyladenosine-3'-phosphate
  modified_base 14: mod_base = OTHER; note = 2'-deoxy-2'-fluoroadenosine-3'-phosphate
  modified_base 15: mod_base = OTHER; note = 2'-O-methylcytidine-3'-phosphate
  modified_base 16: mod_base = OTHER; note = 2'-deoxy-2'-fluoroadenosine-3'-phosphate
  modified_base 17: mod_base = OTHER; note = 2'-O-methyladenosine-3'-phosphate
  modified_base 18: mod_base = OTHER; note = 2'-O-methyladenosine-3'-phosphate
  modified_base 19: mod_base = OTHER; note = 2'-O-methyluridine-3'-phosphate
  modified_base 20: mod_base = OTHER; note = 2'-O-methylguanosine-3'-phosphate
  modified_base 21: mod_base = OTHER; note = 2'-O-methyluridine-3'-phosphate
  modified_base 22: mod_base = OTHER; note = 2'-O-methylcytidine-3'-phosphate
  modified_base 23: mod_base = OTHER; note = 2'-O-methyladenosine
tagtttatttttaacaaatgtca

SEQ ID NO: 5404 - RNA, 23 nt, synthetic construct
  source 1..23: mol_type = other RNA
  modified_base 1: mod_base = OTHER; note = 2'-O-methyluridine-3'-phosphate 5'phosphate
  modified_base 2: mod_base = OTHER; note = 2'-deoxy-2'-fluoroadenosine-3'-phosphate
  modified_base 3: mod_base = OTHER; note = 2'-O-methylguanosine-3'-phosphate
  modified_base 4: mod_base = OTHER; note = 2'-O-methyluridine-3'-phosphate
  modified_base 5: mod_base = OTHER; note = 2'-O-methyluridine-3'-phosphate
  modified_base 6: mod_base = OTHER; note = 2'-deoxy-2'-fluoroadenosine-3'-phosphate
  modified_base 7: mod_base = OTHER; note = 2'-O-methyladenosine-3'-phosphate
  modified_base 8: mod_base = OTHER; note = 2'-O-methylguanosine-3'-phosphate
  modified_base 9: mod_base = OTHER; note = 2'-O-methyluridine-3'-phosphate
  modified_base 10: mod_base = OTHER; note = 2'-O-methyladenosine-3'-phosphate
  modified_base 11: mod_base = OTHER; note = 2'-O-methylcytidine-3'-phosphate
  modified_base 12: mod_base = OTHER; note = 2'-O-methyladenosine-3'-phosphate
  modified_base 13: mod_base = OTHER; note = 2'-O-methylguanosine-3'-phosphate
  modified_base 14: mod_base = OTHER; note = 2'-deoxy-2'-fluoroadenosine-3'-phosphate
  modified_base 15: mod_base = OTHER; note = 2'-O-methylguanosine-3'-phosphate
  modified_base 16: mod_base = OTHER; note = 2'-deoxy-2'-fluorouridine-3'-phosphate
  modified_base 17: mod_base = OTHER; note = 2'-O-methyluridine-3'-phosphate
  modified_base 18: mod_base = OTHER; note = 2'-O-methyluridine-3'-phosphate
  modified_base 19: mod_base = OTHER; note = 2'-O-methyladenosine-3'-phosphate
  modified_base 20: mod_base = OTHER; note = 2'-O-methyluridine-3'-phosphate
  modified_base 21: mod_base = OTHER; note = 2'-O-methyluridine-3'-phosphate
  modified_base 22: mod_base = OTHER; note = 2'-O-methyluridine-3'-phosphate
  modified_base 23: mod_base = OTHER; note = 2'-O-methyluridine
tagttaagtacagagtttatttt

SEQ ID NO: 5405 - RNA, 23 nt, synthetic construct
  source 1..23: mol_type = other RNA
  modified_base 1: mod_base = OTHER; note = 2'-O-methyluridine-3'-phosphate 5'phosphate
  modified_base 2: mod_base = OTHER; note = 2'-deoxy-2'-fluoroadenosine-3'-phosphate
  modified_base 3: mod_base = OTHER; note = 2'-O-methyladenosine-3'-phosphate
  modified_base 4: mod_base = OTHER; note = 2'-O-methylguanosine-3'-phosphate
  modified_base 5: mod_base = OTHER; note = 2'-O-methyluridine-3'-phosphate
  modified_base 6: mod_base = OTHER; note = 2'-deoxy-2'-fluorouridine-3'-phosphate
  modified_base 7: mod_base = OTHER; note = 2'-O-methyladenosine-3'-phosphate
  modified_base 8: mod_base = OTHER; note = 2'-O-methyladenosine-3'-phosphate
  modified_base 9: mod_base = OTHER; note = 2'-O-methylguanosine-3'-phosphate
  modified_base 10: mod_base = OTHER; note = 2'-O-methyluridine-3'-phosphate
  modified_base 11: mod_base = OTHER; note = 2'-O-methyladenosine-3'-phosphate
  modified_base 12: mod_base = OTHER; note = 2'-O-methylcytidine-3'-phosphate
  modified_base 13: mod_base = OTHER; note = 2'-O-methyladenosine-3'-phosphate
  modified_base 14: mod_base = OTHER; note = 2'-deoxy-2'-fluoroguanosine-3'-phosphate
  modified_base 15: mod_base = OTHER; note = 2'-O-methyladenosine-3'-phosphate
  modified_base 16: mod_base = OTHER; note = 2'-deoxy-2'-fluoroguanosine-3'-phosphate
  modified_base 17: mod_base = OTHER; note = 2'-O-methyluridine-3'-phosphate
  modified_base 18: mod_base = OTHER; note = 2'-O-methyluridine-3'-phosphate
  modified_base 19: mod_base = OTHER; note = 2'-O-methyluridine-3'-phosphate
  modified_base 20: mod_base = OTHER; note = 2'-O-methyladenosine-3'-phosphate
  modified_base 21: mod_base = OTHER; note = 2'-O-methyluridine-3'-phosphate
  modified_base 22: mod_base = OTHER; note = 2'-O-methyluridine-3'-phosphate
  modified_base 23: mod_base = OTHER; note = 2'-O-methyluridine
taagttaagtacagagtttattt

SEQ ID NO: 5406 - RNA, 23 nt, synthetic construct
  source 1..23: mol_type = other RNA
  modified_base 1: mod_base = OTHER; note = 2'-O-methyluridine-3'-phosphate 5'phosphate
  modified_base 2: mod_base = OTHER; note = 2'-deoxy-2'-fluoroadenosine-3'-phosphate
  modified_base 3: mod_base = OTHER; note = 2'-O-methyladenosine-3'-phosphate
  modified_base 4: mod_base = OTHER; note = 2'-O-methyladenosine-3'-phosphate
  modified_base 5: mod_base = OTHER; note = 2'-O-methylguanosine-3'-phosphate
  modified_base 6: mod_base = OTHER; note = 2'-deoxy-2'-fluorouridine-3'-phosphate
  modified_base 7: mod_base = OTHER; note = 2'-O-methyluridine-3'-phosphate
  modified_base 8: mod_base = OTHER; note = 2'-O-methyladenosine-3'-phosphate
  modified_base 9: mod_base = OTHER; note = 2'-O-methyladenosine-3'-phosphate
  modified_base 10: mod_base = OTHER; note = 2'-O-methylguanosine-3'-phosphate
  modified_base 11: mod_base = OTHER; note = 2'-O-methyluridine-3'-phosphate
  modified_base 12: mod_base = OTHER; note = 2'-O-methyladenosine-3'-phosphate
  modified_base 13: mod_base = OTHER; note = 2'-O-methylcytidine-3'-phosphate
  modified_base 14: mod_base = OTHER; note = 2'-deoxy-2'-fluoroadenosine-3'-phosphate
  modified_base 15: mod_base = OTHER; note = 2'-O-methylguanosine-3'-phosphate
  modified_base 16: mod_base = OTHER; note = 2'-deoxy-2'-fluoroadenosine-3'-phosphate
  modified_base 17: mod_base = OTHER; note = 2'-O-methylguanosine-3'-phosphate
  modified_base 18: mod_base = OTHER; note = 2'-O-methyluridine-3'-phosphate
  modified_base 19: mod_base = OTHER; note = 2'-O-methyluridine-3'-phosphate
  modified_base 20: mod_base = OTHER; note = 2'-O-methyluridine-3'-phosphate
  modified_base 21: mod_base = OTHER; note = 2'-O-methyladenosine-3'-phosphate
  modified_base 22: mod_base = OTHER; note = 2'-O-methyluridine-3'-phosphate
  modified_base 23: mod_base = OTHER; note = 2'-O-methyluridine
taaagttaagtacagagtttatt

SEQ ID NO: 5407 - RNA, 23 nt, synthetic construct
  source 1..23: mol_type = other RNA
  modified_base 1: mod_base = OTHER; note = 2'-O-methyluridine-3'-phosphate 5'phosphate
  modified_base 2: mod_base = OTHER; note = 2'-deoxy-2'-fluorocytidine-3'-phosphate
  modified_base 3: mod_base = OTHER; note = 2'-O-methyladenosine-3'-phosphate
  modified_base 4: mod_base = OTHER; note = 2'-O-methyladenosine-3'-phosphate
  modified_base 5: mod_base = OTHER; note = 2'-O-methyladenosine-3'-phosphate
  modified_base 6: mod_base = OTHER; note = 2'-deoxy-2'-fluoroguanosine-3'-phosphate
  modified_base 7: mod_base = OTHER; note = 2'-O-methyluridine-3'-phosphate
  modified_base 8: mod_base = OTHER; note = 2'-O-methyluridine-3'-phosphate
  modified_base 9: mod_base = OTHER; note = 2'-O-methyladenosine-3'-phosphate
  modified_base 10: mod_base = OTHER; note = 2'-O-methyladenosine-3'-phosphate
  modified_base 11: mod_base = OTHER; note = 2'-O-methylguanosine-3'-phosphate
  modified_base 12: mod_base = OTHER; note = 2'-O-methyluridine-3'-phosphate
  modified_base 13: mod_base = OTHER; note = 2'-O-methyladenosine-3'-phosphate
  modified_base 14: mod_base = OTHER; note = 2'-deoxy-2'-fluorocytidine-3'-phosphate
  modified_base 15: mod_base = OTHER; note = 2'-O-methyladenosine-3'-phosphate
  modified_base 16: mod_base = OTHER; note = 2'-deoxy-2'-fluoroguanosine-3'-phosphate
  modified_base 17: mod_base = OTHER; note = 2'-O-methyladenosine-3'-phosphate
  modified_base 18: mod_base = OTHER; note = 2'-O-methylguanosine-3'-phosphate
  modified_base 19: mod_base = OTHER; note = 2'-O-methyluridine-3'-phosphate
  modified_base 20: mod_base = OTHER; note = 2'-O-methyluridine-3'-phosphate
  modified_base 21: mod_base = OTHER; note = 2'-O-methyluridine-3'-phosphate
  modified_base 22: mod_base = OTHER; note = 2'-O-methyladenosine-3'-phosphate
  modified_base 23: mod_base = OTHER; note = 2'-O-methyluridine
tcaaagttaagtacagagtttat

SEQ ID NO: 5408 - RNA, 23 nt, synthetic construct
  source 1..23: mol_type = other RNA
  modified_base 1: mod_base = OTHER; note = 2'-O-methyluridine-3'-phosphate 5'phosphate
  modified_base 2: mod_base = OTHER; note = 2'-deoxy-2'-fluorouridine-3'-phosphate
  modified_base 3: mod_base = OTHER; note = 2'-O-methylcytidine-3'-phosphate
  modified_base 4: mod_base = OTHER; note = 2'-O-methyladenosine-3'-phosphate
  modified_base 5: mod_base = OTHER; note = 2'-O-methyladenosine-3'-phosphate
  modified_base 6: mod_base = OTHER; note = 2'-deoxy-2'-fluoroadenosine-3'-phosphate
  modified_base 7: mod_base = OTHER; note = 2'-O-methylguanosine-3'-phosphate
  modified_base 8: mod_base = OTHER; note = 2'-O-methyluridine-3'-phosphate
  modified_base 9: mod_base = OTHER; note = 2'-O-methyluridine-3'-phosphate
  modified_base 10: mod_base = OTHER; note = 2'-O-methyladenosine-3'-phosphate
  modified_base 11: mod_base = OTHER; note = 2'-O-methyladenosine-3'-phosphate
  modified_base 12: mod_base = OTHER; note = 2'-O-methylguanosine-3'-phosphate
  modified_base 13: mod_base = OTHER; note = 2'-O-methyluridine-3'-phosphate
  modified_base 14: mod_base = OTHER; note = 2'-deoxy-2'-fluoroadenosine-3'-phosphate
  modified_base 15: mod_base = OTHER; note = 2'-O-methylcytidine-3'-phosphate
  modified_base 16: mod_base = OTHER; note = 2'-deoxy-2'-fluoroadenosine-3'-phosphate
  modified_base 17: mod_base = OTHER; note = 2'-O-methylguanosine-3'-phosphate
  modified_base 18: mod_base = OTHER; note = 2'-O-methyladenosine-3'-phosphate
  modified_base 19: mod_base = OTHER; note = 2'-O-methylguanosine-3'-phosphate
  modified_base 20: mod_base = OTHER; note = 2'-O-methyluridine-3'-phosphate
  modified_base 21: mod_base = OTHER; note = 2'-O-methyluridine-3'-phosphate
  modified_base 22: mod_base = OTHER; note = 2'-O-methyluridine-3'-phosphate
  modified_base 23: mod_base = OTHER; note = 2'-O-methyladenosine
ttcaaagttaagtacagagttta

SEQ ID NO: 5409 - RNA, 23 nt, synthetic construct
  source 1..23: mol_type = other RNA
  modified_base 1: mod_base = OTHER; note = 2'-O-methyluridine-3'-phosphate 5'phosphate
  modified_base 2: mod_base = OTHER; note = 2'-deoxy-2'-fluoroadenosine-3'-phosphate
  modified_base 3: mod_base = OTHER; note = 2'-O-methyluridine-3'-phosphate
  modified_base 4: mod_base = OTHER; note = 2'-O-methylcytidine-3'-phosphate
  modified_base 5: mod_base = OTHER; note = 2'-O-methyladenosine-3'-phosphate
  modified_base 6: mod_base = OTHER; note = 2'-deoxy-2'-fluoroadenosine-3'-phosphate
  modified_base 7: mod_base = OTHER; note = 2'-O-methyladenosine-3'-phosphate
  modified_base 8: mod_base = OTHER; note = 2'-O-methylguanosine-3'-phosphate
  modified_base 9: mod_base = OTHER; note = 2'-O-methyluridine-3'-phosphate
  modified_base 10: mod_base = OTHER; note = 2'-O-methyluridine-3'-phosphate
  modified_base 11: mod_base = OTHER; note = 2'-O-methyladenosine-3'-phosphate
  modified_base 12: mod_base = OTHER; note = 2'-O-methyladenosine-3'-phosphate
  modified_base 13: mod_base = OTHER; note = 2'-O-methylguanosine-3'-phosphate
  modified_base 14: mod_base = OTHER; note = 2'-deoxy-2'-fluorouridine-3'-phosphate
  modified_base 15: mod_base = OTHER; note = 2'-O-methyladenosine-3'-phosphate
  modified_base 16: mod_base = OTHER; note = 2'-deoxy-2'-fluorocytidine-3'-phosphate
  modified_base 17: mod_base = OTHER; note = 2'-O-methyladenosine-3'-phosphate
  modified_base 18: mod_base = OTHER; note = 2'-O-methylguanosine-3'-phosphate
  modified_base 19: mod_base = OTHER; note = 2'-O-methyladenosine-3'-phosphate
  modified_base 20: mod_base = OTHER; note = 2'-O-methylguanosine-3'-phosphate
  modified_base 21: mod_base = OTHER; note = 2'-O-methyluridine-3'-phosphate
  modified_base 22: mod_base = OTHER; note = 2'-O-methyluridine-3'-phosphate
  modified_base 23: mod_base = OTHER; note = 2'-O-methyluridine
tatcaaagttaagtacagagttt

SEQ ID NO: 5410 - RNA, 23 nt, synthetic construct
  source 1..23: mol_type = other RNA
  modified_base 1: mod_base = OTHER; note = 2'-O-methyluridine-3'-phosphate 5'phosphate
  modified_base 2: mod_base = OTHER; note = 2'-deoxy-2'-fluoroadenosine-3'-phosphate
  modified_base 3: mod_base = OTHER; note = 2'-O-methyladenosine-3'-phosphate
  modified_base 4: mod_base = OTHER; note = 2'-O-methyluridine-3'-phosphate
  modified_base 5: mod_base = OTHER; note = 2'-O-methylcytidine-3'-phosphate
  modified_base 6: mod_base = OTHER; note = 2'-deoxy-2'-fluoroadenosine-3'-phosphate
  modified_base 7: mod_base = OTHER; note = 2'-O-methyladenosine-3'-phosphate
  modified_base 8: mod_base = OTHER; note = 2'-O-methyladenosine-3'-phosphate
  modified_base 9: mod_base = OTHER; note = 2'-O-methylguanosine-3'-phosphate
  modified_base 10: mod_base = OTHER; note = 2'-O-methyluridine-3'-phosphate
  modified_base 11: mod_base = OTHER; note = 2'-O-methyluridine-3'-phosphate
  modified_base 12: mod_base = OTHER; note = 2'-O-methyladenosine-3'-phosphate
  modified_base 13: mod_base = OTHER; note = 2'-O-methyladenosine-3'-phosphate
  modified_base 14: mod_base = OTHER; note = 2'-deoxy-2'-fluoroguanosine-3'-phosphate
  modified_base 15: mod_base = OTHER; note = 2'-O-methyluridine-3'-phosphate
  modified_base 16: mod_base = OTHER; note = 2'-deoxy-2'-fluoroadenosine-3'-phosphate
  modified_base 17: mod_base = OTHER; note = 2'-O-methylcytidine-3'-phosphate
  modified_base 18: mod_base = OTHER; note = 2'-O-methyladenosine-3'-phosphate
  modified_base 19: mod_base = OTHER; note = 2'-O-methylguanosine-3'-phosphate
  modified_base 20: mod_base = OTHER; note = 2'-O-methyladenosine-3'-phosphate
  modified_base 21: mod_base = OTHER; note = 2'-O-methylguanosine-3'-phosphate
  modified_base 22: mod_base = OTHER; note = 2'-O-methyluridine-3'-phosphate
  modified_base 23: mod_base = OTHER; note = 2'-O-methyluridine
taatcaaagttaagtacagagtt

SEQ ID NO: 5411 - RNA, 23 nt, synthetic construct
  source 1..23: mol_type = other RNA
  modified_base 1: mod_base = OTHER; note = 2'-O-methyluridine-3'-phosphate 5'phosphate
  modified_base 2: mod_base = OTHER; note = 2'-deoxy-2'-fluoroadenosine-3'-phosphate
  modified_base 3: mod_base = OTHER; note = 2'-O-methyladenosine-3'-phosphate
  modified_base 4: mod_base = OTHER; note = 2'-O-methyladenosine-3'-phosphate
  modified_base 5: mod_base = OTHER; note = 2'-O-methyluridine-3'-phosphate
  modified_base 6: mod_base = OTHER; note = 2'-deoxy-2'-fluorocytidine-3'-phosphate
  modified_base 7: mod_base = OTHER; note = 2'-O-methyladenosine-3'-phosphate
  modified_base 8: mod_base = OTHER; note = 2'-O-methyladenosine-3'-phosphate
  modified_base 9: mod_base = OTHER; note = 2'-O-methyladenosine-3'-phosphate
  modified_base 10: mod_base = OTHER; note = 2'-O-methylguanosine-3'-phosphate
  modified_base 11: mod_base = OTHER; note = 2'-O-methyluridine-3'-phosphate
  modified_base 12: mod_base = OTHER; note = 2'-O-methyluridine-3'-phosphate
  modified_base 13: mod_base = OTHER; note = 2'-O-methyladenosine-3'-phosphate
  modified_base 14: mod_base = OTHER; note = 2'-deoxy-2'-fluoroadenosine-3'-phosphate
  modified_base 15: mod_base = OTHER; note = 2'-O-methylguanosine-3'-phosphate
  modified_base 16: mod_base = OTHER; note = 2'-deoxy-2'-fluorouridine-3'-phosphate
  modified_base 17: mod_base = OTHER; note = 2'-O-methyladenosine-3'-phosphate
  modified_base 18: mod_base = OTHER; note = 2'-O-methylcytidine-3'-phosphate
  modified_base 19: mod_base = OTHER; note = 2'-O-methyladenosine-3'-phosphate
  modified_base 20: mod_base = OTHER; note = 2'-O-methylguanosine-3'-phosphate
  modified_base 21: mod_base = OTHER; note = 2'-O-methyladenosine-3'-phosphate
  modified_base 22: mod_base = OTHER; note = 2'-O-methylguanosine-3'-phosphate
  modified_base 23: mod_base = OTHER; note = 2'-O-methyluridine
taaatcaaagttaagtacagagt

SEQ ID NO: 5412 - RNA, 23 nt, synthetic construct
  source 1..23: mol_type = other RNA
  modified_base 1: mod_base = OTHER; note = 2'-O-methyluridine-3'-phosphate 5'phosphate
  modified_base 2: mod_base = OTHER; note = 2'-deoxy-2'-fluorocytidine-3'-phosphate
  modified_base 3: mod_base = OTHER; note = 2'-O-methyladenosine-3'-phosphate
  modified_base 4: mod_base = OTHER; note = 2'-O-methyladenosine-3'-phosphate
  modified_base 5: mod_base = OTHER; note = 2'-O-methyladenosine-3'-phosphate
  modified_base 6: mod_base = OTHER; note = 2'-deoxy-2'-fluorouridine-3'-phosphate
  modified_base 7: mod_base = OTHER; note = 2'-O-methylcytidine-3'-phosphate
  modified_base 8: mod_base = OTHER; note = 2'-O-methyladenosine-3'-phosphate
  modified_base 9: mod_base = OTHER; note = 2'-O-methyladenosine-3'-phosphate
  modified_base 10: mod_base = OTHER; note = 2'-O-methyladenosine-3'-phosphate
  modified_base 11: mod_base = OTHER; note = 2'-O-methylguanosine-3'-phosphate
  modified_base 12: mod_base = OTHER; note = 2'-O-methyluridine-3'-phosphate
  modified_base 13: mod_base = OTHER; note = 2'-O-methyluridine-3'-phosphate
  modified_base 14: mod_base = OTHER; note = 2'-deoxy-2'-fluoroadenosine-3'-phosphate
  modified_base 15: mod_base = OTHER; note = 2'-O-methyladenosine-3'-phosphate
  modified_base 16: mod_base = OTHER; note = 2'-deoxy-2'-fluoroguanosine-3'-phosphate
  modified_base 17: mod_base = OTHER; note = 2'-O-methyluridine-3'-phosphate
  modified_base 18: mod_base = OTHER; note = 2'-O-methyladenosine-3'-phosphate
  modified_base 19: mod_base = OTHER; note = 2'-O-methylcytidine-3'-phosphate
  modified_base 20: mod_base = OTHER; note = 2'-O-methyladenosine-3'-phosphate
  modified_base 21: mod_base = OTHER; note = 2'-O-methylguanosine-3'-phosphate
  modified_base 22: mod_base = OTHER; note = 2'-O-methyladenosine-3'-phosphate
  modified_base 23: mod_base = OTHER; note = 2'-O-methylguanosine
tcaaatcaaagttaagtacagag

SEQ ID NO: 5413 - RNA, 23 nt, synthetic construct
  source 1..23: mol_type = other RNA
  modified_base 1: mod_base = OTHER; note = 2'-O-methyluridine-3'-phosphate 5'phosphate
  modified_base 2: mod_base = OTHER; note = 2'-deoxy-2'-fluorouridine-3'-phosphate
  modified_base 3: mod_base = OTHER; note = 2'-O-methylcytidine-3'-phosphate
  modified_base 4: mod_base = OTHER; note = 2'-O-methyladenosine-3'-phosphate
  modified_base 5: mod_base = OTHER; note = 2'-O-methyladenosine-3'-phosphate
  modified_base 6: mod_base = OTHER; note = 2'-deoxy-2'-fluoroadenosine-3'-phosphate
  modified_base 7: mod_base = OTHER; note = 2'-O-methyluridine-3'-phosphate
  modified_base 8: mod_base = OTHER; note = 2'-O-methylcytidine-3'-phosphate
  modified_base 9: mod_base = OTHER; note = 2'-O-methyladenosine-3'-phosphate
  modified_base 10: mod_base = OTHER; note = 2'-O-methyladenosine-3'-phosphate
  modified_base 11: mod_base = OTHER; note = 2'-O-methyladenosine-3'-phosphate
  modified_base 12: mod_base = OTHER; note = 2'-O-methylguanosine-3'-phosphate
  modified_base 13: mod_base = OTHER; note = 2'-O-methyluridine-3'-phosphate
  modified_base 14: mod_base = OTHER; note = 2'-deoxy-2'-fluorouridine-3'-phosphate
  modified_base 15: mod_base = OTHER; note = 2'-O-methyladenosine-3'-phosphate
  modified_base 16: mod_base = OTHER; note = 2'-deoxy-2'-fluoroadenosine-3'-phosphate
  modified_base 17: mod_base = OTHER; note = 2'-O-methylguanosine-3'-phosphate
  modified_base 18: mod_base = OTHER; note = 2'-O-methyluridine-3'-phosphate
  modified_base 19: mod_base = OTHER; note = 2'-O-methyladenosine-3'-phosphate
  modified_base 20: mod_base = OTHER; note = 2'-O-methylcytidine-3'-phosphate
  modified_base 21: mod_base = OTHER; note = 2'-O-methyladenosine-3'-phosphate
  modified_base 22: mod_base = OTHER; note = 2'-O-methylguanosine-3'-phosphate
  modified_base 23: mod_base = OTHER; note = 2'-O-methyladenosine
ttcaaatcaaagttaagtacaga

SEQ ID NO: 5414 - RNA, 23 nt, synthetic construct
  source 1..23: mol_type = other RNA
  modified_base 1: mod_base = OTHER; note = 2'-O-methyluridine-3'-phosphate 5'phosphate
  modified_base 2: mod_base = OTHER; note = 2'-deoxy-2'-fluorocytidine-3'-phosphate
  modified_base 3: mod_base = OTHER; note = 2'-O-methyluridine-3'-phosphate
  modified_base 4: mod_base = OTHER; note = 2'-O-methylcytidine-3'-phosphate
  modified_base 5: mod_base = OTHER; note = 2'-O-methyladenosine-3'-phosphate
  modified_base 6: mod_base = OTHER; note = 2'-deoxy-2'-fluoroadenosine-3'-phosphate
  modified_base 7: mod_base = OTHER; note = 2'-O-methyladenosine-3'-phosphate
  modified_base 8: mod_base = OTHER; note = 2'-O-methyluridine-3'-phosphate
  modified_base 9: mod_base = OTHER; note = 2'-O-methylcytidine-3'-phosphate
  modified_base 10: mod_base = OTHER; note = 2'-O-methyladenosine-3'-phosphate
  modified_base 11: mod_base = OTHER; note = 2'-O-methyladenosine-3'-phosphate
  modified_base 12: mod_base = OTHER; note = 2'-O-methyladenosine-3'-phosphate
  modified_base 13: mod_base = OTHER; note = 2'-O-methylguanosine-3'-phosphate
  modified_base 14: mod_base = OTHER; note = 2'-deoxy-2'-fluorouridine-3'-phosphate
  modified_base 15: mod_base = OTHER; note = 2'-O-methyluridine-3'-phosphate
  modified_base 16: mod_base = OTHER; note = 2'-deoxy-2'-fluoroadenosine-3'-phosphate
  modified_base 17: mod_base = OTHER; note = 2'-O-methyladenosine-3'-phosphate
  modified_base 18: mod_base = OTHER; note = 2'-O-methylguanosine-3'-phosphate
  modified_base 19: mod_base = OTHER; note = 2'-O-methyluridine-3'-phosphate
  modified_base 20: mod_base = OTHER; note = 2'-O-methyladenosine-3'-phosphate
  modified_base 21: mod_base = OTHER; note = 2'-O-methylcytidine-3'-phosphate
  modified_base 22: mod_base = OTHER; note = 2'-O-methyladenosine-3'-phosphate
  modified_base 23: mod_base = OTHER; note = 2'-O-methylguanosine
tctcaaatcaaagttaagtacag

SEQ ID NO: 5415 - RNA, 23 nt, synthetic construct
  source 1..23: mol_type = other RNA
  modified_base 1: mod_base = OTHER; note = 2'-O-methyluridine-3'-phosphate 5'phosphate
  modified_base 2: mod_base = OTHER; note = 2'-deoxy-2'-fluoroadenosine-3'-phosphate
  modified_base 3: mod_base = OTHER; note = 2'-O-methylcytidine-3'-phosphate
  modified_base 4: mod_base = OTHER; note = 2'-O-methyluridine-3'-phosphate
  modified_base 5: mod_base = OTHER; note = 2'-O-methylcytidine-3'-phosphate
  modified_base 6: mod_base = OTHER; note = 2'-deoxy-2'-fluoroadenosine-3'-phosphate
  modified_base 7: mod_base = OTHER; note = 2'-O-methyladenosine-3'-phosphate
  modified_base 8: mod_base = OTHER; note = 2'-O-methyladenosine-3'-phosphate
  modified_base 9: mod_base = OTHER; note = 2'-O-methyluridine-3'-phosphate
  modified_base 10: mod_base = OTHER; note = 2'-O-methylcytidine-3'-phosphate
  modified_base 11: mod_base = OTHER; note = 2'-O-methyladenosine-3'-phosphate
  modified_base 12: mod_base = OTHER; note = 2'-O-methyladenosine-3'-phosphate
  modified_base 13: mod_base = OTHER; note = 2'-O-methyladenosine-3'-phosphate
  modified_base 14: mod_base = OTHER; note = 2'-deoxy-2'-fluoroguanosine-3'-phosphate
  modified_base 15: mod_base = OTHER; note = 2'-O-methyluridine-3'-phosphate
  modified_base 16: mod_base = OTHER; note = 2'-deoxy-2'-fluorouridine-3'-phosphate
  modified_base 17: mod_base = OTHER; note = 2'-O-methyladenosine-3'-phosphate
  modified_base 18: mod_base = OTHER; note = 2'-O-methyladenosine-3'-phosphate
  modified_base 19: mod_base = OTHER; note = 2'-O-methylguanosine-3'-phosphate
  modified_base 20: mod_base = OTHER; note = 2'-O-methyluridine-3'-phosphate
  modified_base 21: mod_base = OTHER; note = 2'-O-methyladenosine-3'-phosphate
  modified_base 22: mod_base = OTHER; note = 2'-O-methylcytidine-3'-phosphate
  modified_base 23: mod_base = OTHER; note = 2'-O-methyladenosine
tactcaaatcaaagttaagtaca

SEQ ID NO: 5416 - RNA, 23 nt, synthetic construct
  source 1..23: mol_type = other RNA
  modified_base 1: mod_base = OTHER; note = 2'-O-methyluridine-3'-phosphate 5'phosphate
  modified_base 2: mod_base = OTHER; note = 2'-deoxy-2'-fluorouridine-3'-phosphate
  modified_base 3: mod_base = OTHER; note = 2'-O-methyladenosine-3'-phosphate
  modified_base 4: mod_base = OTHER; note = 2'-O-methylcytidine-3'-phosphate
  modified_base 5: mod_base = OTHER; note = 2'-O-methyluridine-3'-phosphate
  modified_base 6: mod_base = OTHER; note = 2'-deoxy-2'-fluorocytidine-3'-phosphate
  modified_base 7: mod_base = OTHER; note = 2'-O-methyladenosine-3'-phosphate
  modified_base 8: mod_base = OTHER; note = 2'-O-methyladenosine-3'-phosphate
  modified_base 9: mod_base = OTHER; note = 2'-O-methyladenosine-3'-phosphate
  modified_base 10: mod_base = OTHER; note = 2'-O-methyluridine-3'-phosphate
  modified_base 11: mod_base = OTHER; note = 2'-O-methylcytidine-3'-phosphate
  modified_base 12: mod_base = OTHER; note = 2'-O-methyladenosine-3'-phosphate
  modified_base 13: mod_base = OTHER; note = 2'-O-methyladenosine-3'-phosphate
  modified_base 14: mod_base = OTHER; note = 2'-deoxy-2'-fluoroadenosine-3'-phosphate
  modified_base 15: mod_base = OTHER; note = 2'-O-methylguanosine-3'-phosphate
  modified_base 16: mod_base = OTHER; note = 2'-deoxy-2'-fluorouridine-3'-phosphate
  modified_base 17: mod_base = OTHER; note = 2'-O-methyluridine-3'-phosphate
  modified_base 18: mod_base = OTHER; note = 2'-O-methyladenosine-3'-phosphate
  modified_base 19: mod_base = OTHER; note = 2'-O-methyladenosine-3'-phosphate
  modified_base 20: mod_base = OTHER; note = 2'-O-methylguanosine-3'-phosphate
  modified_base 21: mod_base = OTHER; note = 2'-O-methyluridine-3'-phosphate
  modified_base 22: mod_base = OTHER; note = 2'-O-methyladenosine-3'-phosphate
  modified_base 23: mod_base = OTHER; note = 2'-O-methylcytidine
ttactcaaatcaaagttaagtac

SEQ ID NO: 5417 - RNA, 23 nt, synthetic construct
  source 1..23: mol_type = other RNA
  modified_base 1: mod_base = OTHER; note = 2'-O-methyluridine-3'-phosphate 5'phosphate
  modified_base 2: mod_base = OTHER; note = 2'-deoxy-2'-fluorocytidine-3'-phosphate
  modified_base 3: mod_base = OTHER; note = 2'-O-methylcytidine-3'-phosphate
  modified_base 4: mod_base = OTHER; note = 2'-O-methyladenosine-3'-phosphate
  modified_base 5: mod_base = OTHER; note = 2'-O-methyladenosine-3'-phosphate
  modified_base 6: mod_base = OTHER; note = 2'-deoxy-2'-fluoroadenosine-3'-phosphate
  modified_base 7: mod_base = OTHER; note = 2'-O-methyladenosine-3'-phosphate
  modified_base 8: mod_base = OTHER; note = 2'-O-methyluridine-3'-phosphate
  modified_base 9: mod_base = OTHER; note = 2'-O-methyluridine-3'-phosphate
  modified_base 10: mod_base = OTHER; note = 2'-O-methyluridine-3'-phosphate
  modified_base 11: mod_base = OTHER; note = 2'-O-methyladenosine-3'-phosphate
  modified_base 12: mod_base = OTHER; note = 2'-O-methylcytidine-3'-phosphate
  modified_base 13: mod_base = OTHER; note = 2'-O-methyluridine-3'-phosphate
  modified_base 14: mod_base = OTHER; note = 2'-deoxy-2'-fluorocytidine-3'-phosphate
  modified_base 15: mod_base = OTHER; note = 2'-O-methyladenosine-3'-phosphate
  modified_base 16: mod_base = OTHER; note = 2'-deoxy-2'-fluoroadenosine-3'-phosphate
  modified_base 17: mod_base = OTHER; note = 2'-O-methyladenosine-3'-phosphate
  modified_base 18: mod_base = OTHER; note = 2'-O-methyluridine-3'-phosphate
  modified_base 19: mod_base = OTHER; note = 2'-O-methylcytidine-3'-phosphate
  modified_base 20: mod_base = OTHER; note = 2'-O-methyladenosine-3'-phosphate
  modified_base 21: mod_base = OTHER; note = 2'-O-methyladenosine-3'-phosphate
  modified_base 22: mod_base = OTHER; note = 2'-O-methyladenosine-3'-phosphate
  modified_base 23: mod_base = OTHER; note = 2'-O-methylguanosine
tccaaaatttactcaaatcaaag

SEQ ID NO: 5418 - RNA, 23 nt, synthetic construct
  source 1..23: mol_type = other RNA
  modified_base 1: mod_base = OTHER; note = 2'-O-methyluridine-3'-phosphate 5'phosphate
  modified_base 2: mod_base = OTHER; note = 2'-deoxy-2'-fluorocytidine-3'-phosphate
  modified_base 3: mod_base = OTHER; note = 2'-O-methylcytidine-3'-phosphate
  modified_base 4: mod_base = OTHER; note = 2'-O-methyladenosine-3'-phosphate
  modified_base 5: mod_base = OTHER; note = 2'-O-methyladenosine-3'-phosphate
  modified_base 6: mod_base = OTHER; note = 2'-deoxy-2'-fluoroadenosine-3'-phosphate
  modified_base 7: mod_base = OTHER; note = 2'-O-methyladenosine-3'-phosphate
  modified_base 8: mod_base = OTHER; note = 2'-O-methylcytidine-3'-phosphate
  modified_base 9: mod_base = OTHER; note = 2'-O-methylcytidine-3'-phosphate
  modified_base 10: mod_base = OTHER; note = 2'-O-methyladenosine-3'-phosphate
  modified_base 11: mod_base = OTHER; note = 2'-O-methyladenosine-3'-phosphate
  modified_base 12: mod_base = OTHER; note = 2'-O-methyladenosine-3'-phosphate
  modified_base 13: mod_base = OTHER; note = 2'-O-methyladenosine-3'-phosphate
  modified_base 14: mod_base = OTHER; note = 2'-deoxy-2'-fluorouridine-3'-phosphate
  modified_base 15: mod_base = OTHER; note = 2'-O-methyluridine-3'-phosphate
  modified_base 16: mod_base = OTHER; note = 2'-deoxy-2'-fluorouridine-3'-phosphate
  modified_base 17: mod_base = OTHER; note = 2'-O-methyladenosine-3'-phosphate
  modified_base 18: mod_base = OTHER; note = 2'-O-methylcytidine-3'-phosphate
  modified_base 19: mod_base = OTHER; note = 2'-O-methyluridine-3'-phosphate
  modified_base 20: mod_base = OTHER; note = 2'-O-methylcytidine-3'-phosphate
  modified_base 21: mod_base = OTHER; note = 2'-O-methyladenosine-3'-phosphate
  modified_base 22: mod_base = OTHER; note = 2'-O-methyladenosine-3'-phosphate
  modified_base 23: mod_base = OTHER; note = 2'-O-methyladenosine
tccaaaaccaaaatttactcaaa

SEQ ID NO: 5419 - RNA, 23 nt, synthetic construct
  source 1..23: mol_type = other RNA
  modified_base 1: mod_base = OTHER; note = 2'-O-methyluridine-3'-phosphate 5'phosphate
  modified_base 2: mod_base = OTHER; note = 2'-deoxy-2'-fluoroadenosine-3'-phosphate
  modified_base 3: mod_base = OTHER; note = 2'-O-methylcytidine-3'-phosphate
  modified_base 4: mod_base = OTHER; note = 2'-O-methylcytidine-3'-phosphate
  modified_base 5: mod_base = OTHER; note = 2'-O-methyladenosine-3'-phosphate
  modified_base 6: mod_base = OTHER; note = 2'-deoxy-2'-fluoroadenosine-3'-phosphate
  modified_base 7: mod_base = OTHER; note = 2'-O-methyladenosine-3'-phosphate
  modified_base 8: mod_base = OTHER; note = 2'-O-methyladenosine-3'-phosphate
  modified_base 9: mod_base = OTHER; note = 2'-O-methylcytidine-3'-phosphate
  modified_base 10: mod_base = OTHER; note = 2'-O-methylcytidine-3'-phosphate
  modified_base 11: mod_base = OTHER; note = 2'-O-methyladenosine-3'-phosphate
  modified_base 12: mod_base = OTHER; note = 2'-O-methyladenosine-3'-phosphate
  modified_base 13: mod_base = OTHER; note = 2'-O-methyladenosine-3'-phosphate
  modified_base 14: mod_base = OTHER; note = 2'-deoxy-2'-fluoroadenosine-3'-phosphate
  modified_base 15: mod_base = OTHER; note = 2'-O-methyluridine-3'-phosphate
  modified_base 16: mod_base = OTHER; note = 2'-deoxy-2'-fluorouridine-3'-phosphate
  modified_base 17: mod_base = OTHER; note = 2'-O-methyluridine-3'-phosphate
  modified_base 18: mod_base = OTHER; note = 2'-O-methyladenosine-3'-phosphate
  modified_base 19: mod_base = OTHER; note = 2'-O-methylcytidine-3'-phosphate
  modified_base 20: mod_base = OTHER; note = 2'-O-methyluridine-3'-phosphate
  modified_base 21: mod_base = OTHER; note = 2'-O-methylcytidine-3'-phosphate
  modified_base 22: mod_base = OTHER; note = 2'-O-methyladenosine-3'-phosphate
  modified_base 23: mod_base = OTHER; note = 2'-O-methyladenosine
taccaaaaccaaaatttactcaa

SEQ ID NO: 5420 - RNA, 23 nt, synthetic construct
  source 1..23: mol_type = other RNA
  modified_base 1: mod_base = OTHER; note = 2'-O-methyluridine-3'-phosphate 5'phosphate
  modified_base 2: mod_base = OTHER; note = 2'-deoxy-2'-fluoroguanosine-3'-phosphate
  modified_base 3: mod_base = OTHER; note = 2'-O-methyladenosine-3'-phosphate
  modified_base 4: mod_base = OTHER; note = 2'-O-methylcytidine-3'-phosphate
  modified_base 5: mod_base = OTHER; note = 2'-O-methylcytidine-3'-phosphate
  modified_base 6: mod_base = OTHER; note = 2'-deoxy-2'-fluoroadenosine-3'-phosphate
  modified_base 7: mod_base = OTHER; note = 2'-O-methyladenosine-3'-phosphate
  modified_base 8: mod_base = OTHER; note = 2'-O-methyladenosine-3'-phosphate
  modified_base 9: mod_base = OTHER; note = 2'-O-methyladenosine-3'-phosphate
  modified_base 10: mod_base = OTHER; note = 2'-O-methylcytidine-3'-phosphate
  modified_base 11: mod_base = OTHER; note = 2'-O-methylcytidine-3'-phosphate
  modified_base 12: mod_base = OTHER; note = 2'-O-methyladenosine-3'-phosphate
  modified_base 13: mod_base = OTHER; note = 2'-O-methyladenosine-3'-phosphate
  modified_base 14: mod_base = OTHER; note = 2'-deoxy-2'-fluoroadenosine-3'-phosphate
  modified_base 15: mod_base = OTHER; note = 2'-O-methyladenosine-3'-phosphate
  modified_base 16: mod_base = OTHER; note = 2'-deoxy-2'-fluorouridine-3'-phosphate
  modified_base 17: mod_base = OTHER; note = 2'-O-methyluridine-3'-phosphate
  modified_base 18: mod_base = OTHER; note = 2'-O-methyluridine-3'-phosphate
  modified_base 19: mod_base = OTHER; note = 2'-O-methyladenosine-3'-phosphate
  modified_base 20: mod_base = OTHER; note = 2'-O-methylcytidine-3'-phosphate
  modified_base 21: mod_base = OTHER; note = 2'-O-methyluridine-3'-phosphate
  modified_base 22: mod_base = OTHER; note = 2'-O-methylcytidine-3'-phosphate
  modified_base 23: mod_base = OTHER; note = 2'-O-methyladenosine
tgaccaaaaccaaaatttactca

SEQ ID NO: 5421 - RNA, 23 nt, synthetic construct
  source 1..23: mol_type = other RNA
  modified_base 1: mod_base = OTHER; note = 2'-O-methyluridine-3'-phosphate 5'phosphate
  modified_base 2: mod_base = OTHER; note = 2'-deoxy-2'-fluoroadenosine-3'-phosphate
  modified_base 3: mod_base = OTHER; note = 2'-O-methylguanosine-3'-phosphate
  modified_base 4: mod_base = OTHER; note = 2'-O-methyladenosine-3'-phosphate
  modified_base 5: mod_base = OTHER; note = 2'-O-methylcytidine-3'-phosphate
  modified_base 6: mod_base = OTHER; note = 2'-deoxy-2'-fluorocytidine-3'-phosphate
  modified_base 7: mod_base = OTHER; note = 2'-O-methyladenosine-3'-phosphate
  modified_base 8: mod_base = OTHER; note = 2'-O-methyladenosine-3'-phosphate
  modified_base 9: mod_base = OTHER; note = 2'-O-methyladenosine-3'-phosphate
  modified_base 10: mod_base = OTHER; note = 2'-O-methyladenosine-3'-phosphate
  modified_base 11: mod_base = OTHER; note = 2'-O-methylcytidine-3'-phosphate
  modified_base 12: mod_base = OTHER; note = 2'-O-methylcytidine-3'-phosphate
  modified_base 13: mod_base = OTHER; note = 2'-O-methyladenosine-3'-phosphate
  modified_base 14: mod_base = OTHER; note = 2'-deoxy-2'-fluoroadenosine-3'-phosphate
  modified_base 15: mod_base = OTHER; note = 2'-O-methyladenosine-3'-phosphate
  modified_base 16: mod_base = OTHER; note = 2'-deoxy-2'-fluoroadenosine-3'-phosphate
  modified_base 17: mod_base = OTHER; note = 2'-O-methyluridine-3'-phosphate
  modified_base 18: mod_base = OTHER; note = 2'-O-methyluridine-3'-phosphate
  modified_base 19: mod_base = OTHER; note = 2'-O-methyluridine-3'-phosphate
  modified_base 20: mod_base = OTHER; note = 2'-O-methyladenosine-3'-phosphate
  modified_base 21: mod_base = OTHER; note = 2'-O-methylcytidine-3'-phosphate
  modified_base 22: mod_base = OTHER; note = 2'-O-methyluridine-3'-phosphate
  modified_base 23: mod_base = OTHER; note = 2'-O-methylcytidine
tagaccaaaaccaaaatttactc

SEQ ID NO: 5422 - RNA, 23 nt, synthetic construct
  source 1..23: mol_type = other RNA
  modified_base 1: mod_base = OTHER; note = 2'-O-methyluridine-3'-phosphate 5'phosphate
  modified_base 2: mod_base = OTHER; note = 2'-deoxy-2'-fluoroadenosine-3'-phosphate
  modified_base 3: mod_base = OTHER; note = 2'-O-methyladenosine-3'-phosphate
  modified_base 4: mod_base = OTHER; note = 2'-O-methylguanosine-3'-phosphate
  modified_base 5: mod_base = OTHER; note = 2'-O-methyladenosine-3'-phosphate
  modified_base 6: mod_base = OTHER; note = 2'-deoxy-2'-fluorocytidine-3'-phosphate
  modified_base 7: mod_base = OTHER; note = 2'-O-methylcytidine-3'-phosphate
  modified_base 8: mod_base = OTHER; note = 2'-O-methyladenosine-3'-phosphate
  modified_base 9: mod_base = OTHER; note = 2'-O-methyladenosine-3'-phosphate
  modified_base 10: mod_base = OTHER; note = 2'-O-methyladenosine-3'-phosphate
  modified_base 11: mod_base = OTHER; note = 2'-O-methyladenosine-3'-phosphate
  modified_base 12: mod_base = OTHER; note = 2'-O-methylcytidine-3'-phosphate
  modified_base 13: mod_base = OTHER; note = 2'-O-methylcytidine-3'-phosphate
  modified_base 14: mod_base = OTHER; note = 2'-deoxy-2'-fluoroadenosine-3'-phosphate
  modified_base 15: mod_base = OTHER; note = 2'-O-methyladenosine-3'-phosphate
  modified_base 16: mod_base = OTHER; note = 2'-deoxy-2'-fluoroadenosine-3'-phosphate
  modified_base 17: mod_base = OTHER; note = 2'-O-methyladenosine-3'-phosphate
  modified_base 18: mod_base = OTHER; note = 2'-O-methyluridine-3'-phosphate
  modified_base 19: mod_base = OTHER; note = 2'-O-methyluridine-3'-phosphate
  modified_base 20: mod_base = OTHER; note = 2'-O-methyluridine-3'-phosphate
  modified_base 21: mod_base = OTHER; note = 2'-O-methyladenosine-3'-phosphate
  modified_base 22: mod_base = OTHER; note = 2'-O-methylcytidine-3'-phosphate
  modified_base 23: mod_base = OTHER; note = 2'-O-methyluridine
taagaccaaaaccaaaatttact

SEQ ID NO: 5423 - RNA, 23 nt, synthetic construct
  source 1..23: mol_type = other RNA
  modified_base 1: mod_base = OTHER; note = 2'-O-methyluridine-3'-phosphate 5'phosphate
  modified_base 2: mod_base = OTHER; note = 2'-deoxy-2'-fluoroguanosine-3'-phosphate
  modified_base 3: mod_base = OTHER; note = 2'-O-methyladenosine-3'-phosphate
  modified_base 4: mod_base = OTHER; note = 2'-O-methyladenosine-3'-phosphate
  modified_base 5: mod_base = OTHER; note = 2'-O-methylguanosine-3'-phosphate
  modified_base 6: mod_base = OTHER; note = 2'-deoxy-2'-fluoroadenosine-3'-phosphate
  modified_base 7: mod_base = OTHER; note = 2'-O-methylcytidine-3'-phosphate
  modified_base 8: mod_base = OTHER; note = 2'-O-methylcytidine-3'-phosphate
  modified_base 9: mod_base = OTHER; note = 2'-O-methyladenosine-3'-phosphate
  modified_base 10: mod_base = OTHER; note = 2'-O-methyladenosine-3'-phosphate
  modified_base 11: mod_base = OTHER; note = 2'-O-methyladenosine-3'-phosphate
  modified_base 12: mod_base = OTHER; note = 2'-O-methyladenosine-3'-phosphate
  modified_base 13: mod_base = OTHER; note = 2'-O-methylcytidine-3'-phosphate
  modified_base 14: mod_base = OTHER; note = 2'-deoxy-2'-fluorocytidine-3'-phosphate
  modified_base 15: mod_base = OTHER; note = 2'-O-methyladenosine-3'-phosphate
  modified_base 16: mod_base = OTHER; note = 2'-deoxy-2'-fluoroadenosine-3'-phosphate
  modified_base 17: mod_base = OTHER; note = 2'-O-methyladenosine-3'-phosphate
  modified_base 18: mod_base = OTHER; note = 2'-O-methyladenosine-3'-phosphate
  modified_base 19: mod_base = OTHER; note = 2'-O-methyluridine-3'-phosphate
  modified_base 20: mod_base = OTHER; note = 2'-O-methyluridine-3'-phosphate
  modified_base 21: mod_base = OTHER; note = 2'-O-methyluridine-3'-phosphate
  modified_base 22: mod_base = OTHER; note = 2'-O-methyladenosine-3'-phosphate
  modified_base 23: mod_base = OTHER; note = 2'-O-methylcytidine
tgaagaccaaaaccaaaatttac

SEQ ID NO: 5424 - RNA, 23 nt, synthetic construct
  source 1..23: mol_type = other RNA
  modified_base 1: mod_base = OTHER; note = 2'-O-methyluridine-3'-phosphate 5'phosphate
  modified_base 2: mod_base = OTHER; note = 2'-deoxy-2'-fluorouridine-3'-phosphate
  modified_base 3: mod_base = OTHER; note = 2'-O-methyluridine-3'-phosphate
  modified_base 4: mod_base = OTHER; note = 2'-O-methylguanosine-3'-phosphate
  modified_base 5: mod_base = OTHER; note = 2'-O-methyladenosine-3'-phosphate
  modified_base 6: mod_base = OTHER; note = 2'-deoxy-2'-fluoroadenosine-3'-phosphate
  modified_base 7: mod_base = OTHER; note = 2'-O-methylguanosine-3'-phosphate
  modified_base 8: mod_base = OTHER; note = 2'-O-methyladenosine-3'-phosphate
  modified_base 9: mod_base = OTHER; note = 2'-O-methylcytidine-3'-phosphate
  modified_base 10: mod_base = OTHER; note = 2'-O-methylcytidine-3'-phosphate
  modified_base 11: mod_base = OTHER; note = 2'-O-methyladenosine-3'-phosphate
  modified_base 12: mod_base = OTHER; note = 2'-O-methyladenosine-3'-phosphate
  modified_base 13: mod_base = OTHER; note = 2'-O-methyladenosine-3'-phosphate
  modified_base 14: mod_base = OTHER; note = 2'-deoxy-2'-fluoroadenosine-3'-phosphate
  modified_base 15: mod_base = OTHER; note = 2'-O-methylcytidine-3'-phosphate
  modified_base 16: mod_base = OTHER; note = 2'-deoxy-2'-fluorocytidine-3'-phosphate
  modified_base 17: mod_base = OTHER; note = 2'-O-methyladenosine-3'-phosphate
  modified_base 18: mod_base = OTHER; note = 2'-O-methyladenosine-3'-phosphate
  modified_base 19: mod_base = OTHER; note = 2'-O-methyladenosine-3'-phosphate
  modified_base 20: mod_base = OTHER; note = 2'-O-methyladenosine-3'-phosphate
  modified_base 21: mod_base = OTHER; note = 2'-O-methyluridine-3'-phosphate
  modified_base 22: mod_base = OTHER; note = 2'-O-methyluridine-3'-phosphate
  modified_base 23: mod_base = OTHER; note = 2'-O-methyluridine
tttgaagaccaaaaccaaaattt

SEQ ID NO: 5425 - RNA, 23 nt, synthetic construct
  source 1..23: mol_type = other RNA
  modified_base 1: mod_base = OTHER; note = 2'-O-methyluridine-3'-phosphate 5'phosphate
  modified_base 2: mod_base = OTHER; note = 2'-deoxy-2'-fluorouridine-3'-phosphate
  modified_base 3: mod_base = OTHER; note = 2'-O-methylguanosine-3'-phosphate
  modified_base 4: mod_base = OTHER; note = 2'-O-methyluridine-3'-phosphate
  modified_base 5: mod_base = OTHER; note = 2'-O-methyluridine-3'-phosphate
  modified_base 6: mod_base = OTHER; note = 2'-deoxy-2'-fluoroguanosine-3'-phosphate
  modified_base 7: mod_base = OTHER; note = 2'-O-methyladenosine-3'-phosphate
  modified_base 8: mod_base = OTHER; note = 2'-O-methyladenosine-3'-phosphate
  modified_base 9: mod_base = OTHER; note = 2'-O-methylguanosine-3'-phosphate
  modified_base 10: mod_base = OTHER; note = 2'-O-methyladenosine-3'-phosphate
  modified_base 11: mod_base = OTHER; note = 2'-O-methylcytidine-3'-phosphate
  modified_base 12: mod_base = OTHER; note = 2'-O-methylcytidine-3'-phosphate
  modified_base 13: mod_base = OTHER; note = 2'-O-methyladenosine-3'-phosphate
  modified_base 14: mod_base = OTHER; note = 2'-deoxy-2'-fluoroadenosine-3'-phosphate
  modified_base 15: mod_base = OTHER; note = 2'-O-methyladenosine-3'-phosphate
  modified_base 16: mod_base = OTHER; note = 2'-deoxy-2'-fluoroadenosine-3'-phosphate
  modified_base 17: mod_base = OTHER; note = 2'-O-methylcytidine-3'-phosphate
  modified_base 18: mod_base = OTHER; note = 2'-O-methylcytidine-3'-phosphate
  modified_base 19: mod_base = OTHER; note = 2'-O-methyladenosine-3'-phosphate
  modified_base 20: mod_base = OTHER; note = 2'-O-methyladenosine-3'-phosphate
  modified_base 21: mod_base = OTHER; note = 2'-O-methyladenosine-3'-phosphate
  modified_base 22: mod_base = OTHER; note = 2'-O-methyladenosine-3'-phosphate
  modified_base 23: mod_base = OTHER; note = 2'-O-methyluridine
ttgttgaagaccaaaaccaaaat

SEQ ID NO: 5426 - RNA, 23 nt, synthetic construct
  source 1..23: mol_type = other RNA
  modified_base 1: mod_base = OTHER; note = 2'-O-methyluridine-3'-phosphate 5'phosphate
  modified_base 2: mod_base = OTHER; note = 2'-deoxy-2'-fluoroadenosine-3'-phosphate
  modified_base 3: mod_base = OTHER; note = 2'-O-methyluridine-3'-phosphate
  modified_base 4: mod_base = OTHER; note = 2'-O-methylguanosine-3'-phosphate
  modified_base 5: mod_base = OTHER; note = 2'-O-methyluridine-3'-phosphate
  modified_base 6: mod_base = OTHER; note = 2'-deoxy-2'-fluorouridine-3'-phosphate
  modified_base 7: mod_base = OTHER; note = 2'-O-methylguanosine-3'-phosphate
  modified_base 8: mod_base = OTHER; note = 2'-O-methyladenosine-3'-phosphate
  modified_base 9: mod_base = OTHER; note = 2'-O-methyladenosine-3'-phosphate
  modified_base 10: mod_base = OTHER; note = 2'-O-methylguanosine-3'-phosphate
  modified_base 11: mod_base = OTHER; note = 2'-O-methyladenosine-3'-phosphate
  modified_base 12: mod_base = OTHER; note = 2'-O-methylcytidine-3'-phosphate
  modified_base 13: mod_base = OTHER; note = 2'-O-methylcytidine-3'-phosphate
  modified_base 14: mod_base = OTHER; note = 2'-deoxy-2'-fluoroadenosine-3'-phosphate
  modified_base 15: mod_base = OTHER; note = 2'-O-methyladenosine-3'-phosphate
  modified_base 16: mod_base = OTHER; note = 2'-deoxy-2'-fluoroadenosine-3'-phosphate
  modified_base 17: mod_base = OTHER; note = 2'-O-methyladenosine-3'-phosphate
  modified_base 18: mod_base = OTHER; note = 2'-O-methylcytidine-3'-phosphate
  modified_base 19: mod_base = OTHER; note = 2'-O-methylcytidine-3'-phosphate
  modified_base 20: mod_base = OTHER; note = 2'-O-methyladenosine-3'-phosphate
  modified_base 21: mod_base = OTHER; note = 2'-O-methyladenosine-3'-phosphate
  modified_base 22: mod_base = OTHER; note = 2'-O-methyladenosine-3'-phosphate
  modified_base 23: mod_base = OTHER; note = 2'-O-methyladenosine
tatgttgaagaccaaaaccaaaa

SEQ ID NO: 5427 - RNA, 23 nt, synthetic construct
  source 1..23: mol_type = other RNA
  modified_base 1: mod_base = OTHER; note = 2'-O-methyluridine-3'-phosphate 5'phosphate
  modified_base 2: mod_base = OTHER; note = 2'-deoxy-2'-fluoroadenosine-3'-phosphate
  modified_base 3: mod_base = OTHER; note = 2'-O-methyladenosine-3'-phosphate
  modified_base 4: mod_base = OTHER; note = 2'-O-methyluridine-3'-phosphate
  modified_base 5: mod_base = OTHER; note = 2'-O-methylguanosine-3'-phosphate
  modified_base 6: mod_base = OTHER; note = 2'-deoxy-2'-fluorouridine-3'-phosphate
  modified_base 7: mod_base = OTHER; note = 2'-O-methyluridine-3'-phosphate
  modified_base 8: mod_base = OTHER; note = 2'-O-methylguanosine-3'-phosphate
  modified_base 9: mod_base = OTHER; note = 2'-O-methyladenosine-3'-phosphate
  modified_base 10: mod_base = OTHER; note = 2'-O-methyladenosine-3'-phosphate
  modified_base 11: mod_base = OTHER; note = 2'-O-methylguanosine-3'-phosphate
  modified_base 12: mod_base = OTHER; note = 2'-O-methyladenosine-3'-phosphate
  modified_base 13: mod_base = OTHER; note = 2'-O-methylcytidine-3'-phosphate
  modified_base 14: mod_base = OTHER; note = 2'-deoxy-2'-fluorocytidine-3'-phosphate
  modified_base 15: mod_base = OTHER; note = 2'-O-methyladenosine-3'-phosphate
  modified_base 16: mod_base = OTHER; note = 2'-deoxy-2'-fluoroadenosine-3'-phosphate
  modified_base 17: mod_base = OTHER; note = 2'-O-methyladenosine-3'-phosphate
  modified_base 18: mod_base = OTHER; note = 2'-O-methyladenosine-3'-phosphate
  modified_base 19: mod_base = OTHER; note = 2'-O-methylcytidine-3'-phosphate
  modified_base 20: mod_base = OTHER; note = 2'-O-methylcytidine-3'-phosphate
  modified_base 21: mod_base = OTHER; note = 2'-O-methyladenosine-3'-phosphate
  modified_base 22: mod_base = OTHER; note = 2'-O-methyladenosine-3'-phosphate
  modified_base 23: mod_base = OTHER; note = 2'-O-methyladenosine
taatgttgaagaccaaaaccaaa

SEQ ID NO: 5428 - RNA, 23 nt, synthetic construct
  source 1..23: mol_type = other RNA
  modified_base 1: mod_base = OTHER; note = 2'-O-methyluridine-3'-phosphate 5'phosphate
  modified_base 2: mod_base = OTHER; note = 2'-deoxy-2'-fluoroadenosine-3'-phosphate
  modified_base 3: mod_base = OTHER; note = 2'-O-methyladenosine-3'-phosphate
  modified_base 4: mod_base = OTHER; note = 2'-O-methyladenosine-3'-phosphate
  modified_base 5: mod_base = OTHER; note = 2'-O-methyluridine-3'-phosphate
  modified_base 6: mod_base = OTHER; note = 2'-deoxy-2'-fluoroguanosine-3'-phosphate
  modified_base 7: mod_base = OTHER; note = 2'-O-methyluridine-3'-phosphate
  modified_base 8: mod_base = OTHER; note = 2'-O-methyluridine-3'-phosphate
  modified_base 9: mod_base = OTHER; note = 2'-O-methylguanosine-3'-phosphate
  modified_base 10: mod_base = OTHER; note = 2'-O-methyladenosine-3'-phosphate
  modified_base 11: mod_base = OTHER; note = 2'-O-methyladenosine-3'-phosphate
  modified_base 12: mod_base = OTHER; note = 2'-O-methylguanosine-3'-phosphate
  modified_base 13: mod_base = OTHER; note = 2'-O-methyladenosine-3'-phosphate
  modified_base 14: mod_base = OTHER; note = 2'-deoxy-2'-fluorocytidine-3'-phosphate
  modified_base 15: mod_base = OTHER; note = 2'-O-methylcytidine-3'-phosphate
  modified_base 16: mod_base = OTHER; note = 2'-deoxy-2'-fluoroadenosine-3'-phosphate
  modified_base 17: mod_base = OTHER; note = 2'-O-methyladenosine-3'-phosphate
  modified_base 18: mod_base = OTHER; note = 2'-O-methyladenosine-3'-phosphate
  modified_base 19: mod_base = OTHER; note = 2'-O-methyladenosine-3'-phosphate
  modified_base 20: mod_base = OTHER; note = 2'-O-methylcytidine-3'-phosphate
  modified_base 21: mod_base = OTHER; note = 2'-O-methylcytidine-3'-phosphate
  modified_base 22: mod_base = OTHER; note = 2'-O-methyladenosine-3'-phosphate
  modified_base 23: mod_base = OTHER; note = 2'-O-methyladenosine
taaatgttgaagaccaaaaccaa

SEQ ID NO: 5429 - RNA, 23 nt, synthetic construct
  source 1..23: mol_type = other RNA
  modified_base 1: mod_base = OTHER; note = 2'-O-methyluridine-3'-phosphate 5'phosphate
  modified_base 2: mod_base = OTHER; note = 2'-deoxy-2'-fluoroadenosine-3'-phosphate
  modified_base 3: mod_base = OTHER; note = 2'-O-methyladenosine-3'-phosphate
  modified_base 4: mod_base = OTHER; note = 2'-O-methyladenosine-3'-phosphate
  modified_base 5: mod_base = OTHER; note = 2'-O-methyladenosine-3'-phosphate
  modified_base 6: mod_base = OTHER; note = 2'-deoxy-2'-fluorouridine-3'-phosphate
  modified_base 7: mod_base = OTHER; note = 2'-O-methylguanosine-3'-phosphate
  modified_base 8: mod_base = OTHER; note = 2'-O-methyluridine-3'-phosphate
  modified_base 9: mod_base = OTHER; note = 2'-O-methyluridine-3'-phosphate
  modified_base 10: mod_base = OTHER; note = 2'-O-methylguanosine-3'-phosphate
  modified_base 11: mod_base = OTHER; note = 2'-O-methyladenosine-3'-phosphate
  modified_base 12: mod_base = OTHER; note = 2'-O-methyladenosine-3'-phosphate
  modified_base 13: mod_base = OTHER; note = 2'-O-methylguanosine-3'-phosphate
  modified_base 14: mod_base = OTHER; note = 2'-deoxy-2'-fluoroadenosine-3'-phosphate
  modified_base 15: mod_base = OTHER; note = 2'-O-methylcytidine-3'-phosphate
  modified_base 16: mod_base = OTHER; note = 2'-deoxy-2'-fluorocytidine-3'-phosphate
  modified_base 17: mod_base = OTHER; note = 2'-O-methyladenosine-3'-phosphate
  modified_base 18: mod_base = OTHER; note = 2'-O-methyladenosine-3'-phosphate
  modified_base 19: mod_base = OTHER; note = 2'-O-methyladenosine-3'-phosphate
  modified_base 20: mod_base = OTHER; note = 2'-O-methyladenosine-3'-phosphate
  modified_base 21: mod_base = OTHER; note = 2'-O-methylcytidine-3'-phosphate
  modified_base 22: mod_base = OTHER; note = 2'-O-methylcytidine-3'-phosphate
  modified_base 23: mod_base = OTHER; note = 2'-O-methyladenosine
taaaatgttgaagaccaaaacca

SEQ ID NO: 5430 - RNA, 23 nt, synthetic construct
  source 1..23: mol_type = other RNA
  modified_base 1: mod_base = OTHER; note = 2'-O-methyluridine-3'-phosphate 5'phosphate
  modified_base 2: mod_base = OTHER; note = 2'-deoxy-2'-fluoroguanosine-3'-phosphate
  modified_base 3: mod_base = OTHER; note = 2'-O-methyladenosine-3'-phosphate
  modified_base 4: mod_base = OTHER; note = 2'-O-methyladenosine-3'-phosphate
  modified_base 5: mod_base = OTHER; note = 2'-O-methyladenosine-3'-phosphate
  modified_base 6: mod_base = OTHER; note = 2'-deoxy-2'-fluoroadenosine-3'-phosphate
  modified_base 7: mod_base = OTHER; note = 2'-O-methyluridine-3'-phosphate
  modified_base 8: mod_base = OTHER; note = 2'-O-methylguanosine-3'-phosphate
  modified_base 9: mod_base = OTHER; note = 2'-O-methyluridine-3'-phosphate
  modified_base 10: mod_base = OTHER; note = 2'-O-methyluridine-3'-phosphate
  modified_base 11: mod_base = OTHER; note = 2'-O-methylguanosine-3'-phosphate
  modified_base 12: mod_base = OTHER; note = 2'-O-methyladenosine-3'-phosphate
  modified_base 13: mod_base = OTHER; note = 2'-O-methyladenosine-3'-phosphate
  modified_base 14: mod_base = OTHER; note = 2'-deoxy-2'-fluoroguanosine-3'-phosphate
  modified_base 15: mod_base = OTHER; note = 2'-O-methyladenosine-3'-phosphate
  modified_base 16: mod_base = OTHER; note = 2'-deoxy-2'-fluorocytidine-3'-phosphate
  modified_base 17: mod_base = OTHER; note = 2'-O-methylcytidine-3'-phosphate
  modified_base 18: mod_base = OTHER; note = 2'-O-methyladenosine-3'-phosphate
  modified_base 19: mod_base = OTHER; note = 2'-O-methyladenosine-3'-phosphate
  modified_base 20: mod_base = OTHER; note = 2'-O-methyladenosine-3'-phosphate
  modified_base 21: mod_base = OTHER; note = 2'-O-methyladenosine-3'-phosphate
  modified_base 22: mod_base = OTHER; note = 2'-O-methylcytidine-3'-phosphate
  modified_base 23: mod_base = OTHER; note = 2'-O-methylcytidine
tgaaaatgttgaagaccaaaacc

SEQ ID NO: 5431 - RNA, 23 nt, synthetic construct
  source 1..23: mol_type = other RNA
  modified_base 1: mod_base = OTHER; note = 2'-O-methyluridine-3'-phosphate 5'phosphate
  modified_base 2: mod_base = OTHER; note = 2'-deoxy-2'-fluorouridine-3'-phosphate
  modified_base 3: mod_base = OTHER; note = 2'-O-methylguanosine-3'-phosphate
  modified_base 4: mod_base = OTHER; note = 2'-O-methyladenosine-3'-phosphate
  modified_base 5: mod_base = OTHER; note = 2'-O-methyladenosine-3'-phosphate
  modified_base 6: mod_base = OTHER; note = 2'-deoxy-2'-fluoroadenosine-3'-phosphate
  modified_base 7: mod_base = OTHER; note = 2'-O-methyladenosine-3'-phosphate
  modified_base 8: mod_base = OTHER; note = 2'-O-methyluridine-3'-phosphate
  modified_base 9: mod_base = OTHER; note = 2'-O-methylguanosine-3'-phosphate
  modified_base 10: mod_base = OTHER; note = 2'-O-methyluridine-3'-phosphate
  modified_base 11: mod_base = OTHER; note = 2'-O-methyluridine-3'-phosphate
  modified_base 12: mod_base = OTHER; note = 2'-O-methylguanosine-3'-phosphate
  modified_base 13: mod_base = OTHER; note = 2'-O-methyladenosine-3'-phosphate
  modified_base 14: mod_base = OTHER; note = 2'-deoxy-2'-fluoroadenosine-3'-phosphate
  modified_base 15: mod_base = OTHER; note = 2'-O-methylguanosine-3'-phosphate
  modified_base 16: mod_base = OTHER; note = 2'-deoxy-2'-fluoroadenosine-3'-phosphate
  modified_base 17: mod_base = OTHER; note = 2'-O-methylcytidine-3'-phosphate
  modified_base 18: mod_base = OTHER; note = 2'-O-methylcytidine-3'-phosphate
  modified_base 19: mod_base = OTHER; note = 2'-O-methyladenosine-3'-phosphate
  modified_base 20: mod_base = OTHER; note = 2'-O-methyladenosine-3'-phosphate
  modified_base 21: mod_base = OTHER; note = 2'-O-methyladenosine-3'-phosphate
  modified_base 22: mod_base = OTHER; note = 2'-O-methyladenosine-3'-phosphate
  modified_base 23: mod_base = OTHER; note = 2'-O-methylcytidine
ttgaaaatgttgaagaccaaaac

SEQ ID NO: 5432 - RNA, 23 nt, synthetic construct
  source 1..23: mol_type = other RNA
  modified_base 1: mod_base = OTHER; note = 2'-O-methyluridine-3'-phosphate 5'phosphate
  modified_base 2: mod_base = OTHER; note = 2'-deoxy-2'-fluoroadenosine-3'-phosphate
  modified_base 3: mod_base = OTHER; note = 2'-O-methyluridine-3'-phosphate
  modified_base 4: mod_base = OTHER; note = 2'-O-methylguanosine-3'-phosphate
  modified_base 5: mod_base = OTHER; note = 2'-O-methyladenosine-3'-phosphate
  modified_base 6: mod_base = OTHER; note = 2'-deoxy-2'-fluoroadenosine-3'-phosphate
  modified_base 7: mod_base = OTHER; note = 2'-O-methyladenosine-3'-phosphate
  modified_base 8: mod_base = OTHER; note = 2'-O-methyladenosine-3'-phosphate
  modified_base 9: mod_base = OTHER; note = 2'-O-methyluridine-3'-phosphate
  modified_base 10: mod_base = OTHER; note = 2'-O-methylguanosine-3'-phosphate
  modified_base 11: mod_base = OTHER; note = 2'-O-methyluridine-3'-phosphate
  modified_base 12: mod_base = OTHER; note = 2'-O-methyluridine-3'-phosphate
  modified_base 13: mod_base = OTHER; note = 2'-O-methylguanosine-3'-phosphate
  modified_base 14: mod_base = OTHER; note = 2'-deoxy-2'-fluoroadenosine-3'-phosphate
  modified_base 15: mod_base = OTHER; note = 2'-O-methyladenosine-3'-phosphate
  modified_base 16: mod_base = OTHER; note = 2'-deoxy-2'-fluoroguanosine-3'-phosphate
  modified_base 17: mod_base = OTHER; note = 2'-O-methyladenosine-3'-phosphate
  modified_base 18: mod_base = OTHER; note = 2'-O-methylcytidine-3'-phosphate
  modified_base 19: mod_base = OTHER; note = 2'-O-methylcytidine-3'-phosphate
  modified_base 20: mod_base = OTHER; note = 2'-O-methyladenosine-3'-phosphate
  modified_base 21: mod_base = OTHER; note = 2'-O-methyladenosine-3'-phosphate
  modified_base 22: mod_base = OTHER; note = 2'-O-methyladenosine-3'-phosphate
  modified_base 23: mod_base = OTHER; note = 2'-O-methyladenosine
tatgaaaatgttgaagaccaaaa

SEQ ID NO: 5433 - RNA, 23 nt, synthetic construct
  source 1..23: mol_type = other RNA
  modified_base 1: mod_base = OTHER; note = 2'-O-methyluridine-3'-phosphate 5'phosphate
  modified_base 2: mod_base = OTHER; note = 2'-deoxy-2'-fluorocytidine-3'-phosphate
  modified_base 3: mod_base = OTHER; note = 2'-O-methyladenosine-3'-phosphate
  modified_base 4: mod_base = OTHER; note = 2'-O-methyluridine-3'-phosphate
  modified_base 5: mod_base = OTHER; note = 2'-O-methylguanosine-3'-phosphate
  modified_base 6: mod_base = OTHER; note = 2'-deoxy-2'-fluoroadenosine-3'-phosphate
  modified_base 7: mod_base = OTHER; note = 2'-O-methyladenosine-3'-phosphate
  modified_base 8: mod_base = OTHER; note = 2'-O-methyladenosine-3'-phosphate
  modified_base 9: mod_base = OTHER; note = 2'-O-methyladenosine-3'-phosphate
  modified_base 10: mod_base = OTHER; note = 2'-O-methyluridine-3'-phosphate
  modified_base 11: mod_base = OTHER; note = 2'-O-methylguanosine-3'-phosphate
  modified_base 12: mod_base = OTHER; note = 2'-O-methyluridine-3'-phosphate
  modified_base 13: mod_base = OTHER; note = 2'-O-methyluridine-3'-phosphate
  modified_base 14: mod_base = OTHER; note = 2'-deoxy-2'-fluoroguanosine-3'-phosphate
  modified_base 15: mod_base = OTHER; note = 2'-O-methyladenosine-3'-phosphate
  modified_base 16: mod_base = OTHER; note = 2'-deoxy-2'-fluoroadenosine-3'-phosphate
  modified_base 17: mod_base = OTHER; note = 2'-O-methylguanosine-3'-phosphate
  modified_base 18: mod_base = OTHER; note = 2'-O-methyladenosine-3'-phosphate
  modified_base 19: mod_base = OTHER; note = 2'-O-methylcytidine-3'-phosphate
  modified_base 20: mod_base = OTHER; note = 2'-O-methylcytidine-3'-phosphate
  modified_base 21: mod_base = OTHER; note = 2'-O-methyladenosine-3'-phosphate
  modified_base 22: mod_base = OTHER; note = 2'-O-methyladenosine-3'-phosphate
  modified_base 23: mod_base = OTHER; note = 2'-O-methyladenosine
tcatgaaaatgttgaagaccaaa

SEQ ID NO: 5434 - RNA, 23 nt, synthetic construct
  source 1..23: mol_type = other RNA
  modified_base 1: mod_base = OTHER; note = 2'-O-methyluridine-3'-phosphate 5'phosphate
  modified_base 2: mod_base = OTHER; note = 2'-deoxy-2'-fluoroguanosine-3'-phosphate
  modified_base 3: mod_base = OTHER; note = 2'-O-methylcytidine-3'-phosphate
  modified_base 4: mod_base = OTHER; note = 2'-O-methyladenosine-3'-phosphate
  modified_base 5: mod_base = OTHER; note = 2'-O-methyluridine-3'-phosphate
  modified_base 6: mod_base = OTHER; note = 2'-deoxy-2'-fluoroguanosine-3'-phosphate
  modified_base 7: mod_base = OTHER; note = 2'-O-methyladenosine-3'-phosphate
  modified_base 8: mod_base = OTHER; note = 2'-O-methyladenosine-3'-phosphate
  modified_base 9: mod_base = OTHER; note = 2'-O-methyladenosine-3'-phosphate
  modified_base 10: mod_base = OTHER; note = 2'-O-methyladenosine-3'-phosphate
  modified_base 11: mod_base = OTHER; note = 2'-O-methyluridine-3'-phosphate
  modified_base 12: mod_base = OTHER; note = 2'-O-methylguanosine-3'-phosphate
  modified_base 13: mod_base = OTHER; note = 2'-O-methyluridine-3'-phosphate
  modified_base 14: mod_base = OTHER; note = 2'-deoxy-2'-fluorouridine-3'-phosphate
  modified_base 15: mod_base = OTHER; note = 2'-O-methylguanosine-3'-phosphate
  modified_base 16: mod_base = OTHER; note = 2'-deoxy-2'-fluoroadenosine-3'-phosphate
  modified_base 17: mod_base = OTHER; note = 2'-O-methyladenosine-3'-phosphate
  modified_base 18: mod_base = OTHER; note = 2'-O-methylguanosine-3'-phosphate
  modified_base 19: mod_base = OTHER; note = 2'-O-methyladenosine-3'-phosphate
  modified_base 20: mod_base = OTHER; note = 2'-O-methylcytidine-3'-phosphate
  modified_base 21: mod_base = OTHER; note = 2'-O-methylcytidine-3'-phosphate
  modified_base 22: mod_base = OTHER; note = 2'-O-methyladenosine-3'-phosphate
  modified_base 23: mod_base = OTHER; note = 2'-O-methyladenosine
tgcatgaaaatgttgaagaccaa

SEQ ID NO: 5435 - RNA, 23 nt, synthetic construct
  source 1..23: mol_type = other RNA
  modified_base 1: mod_base = OTHER; note = 2'-O-methyluridine-3'-phosphate 5'phosphate
  modified_base 2: mod_base = OTHER; note = 2'-deoxy-2'-fluoroadenosine-3'-phosphate
  modified_base 3: mod_base = OTHER; note = 2'-O-methylguanosine-3'-phosphate
  modified_base 4: mod_base = OTHER; note = 2'-O-methylcytidine-3'-phosphate
  modified_base 5: mod_base = OTHER; note = 2'-O-methyladenosine-3'-phosphate
  modified_base 6: mod_base = OTHER; note = 2'-deoxy-2'-fluorouridine-3'-phosphate
  modified_base 7: mod_base = OTHER; note = 2'-O-methylguanosine-3'-phosphate
  modified_base 8: mod_base = OTHER; note = 2'-O-methyladenosine-3'-phosphate
  modified_base 9: mod_base = OTHER; note = 2'-O-methyladenosine-3'-phosphate
  modified_base 10: mod_base = OTHER; note = 2'-O-methyladenosine-3'-phosphate
  modified_base 11: mod_base = OTHER; note = 2'-O-methyladenosine-3'-phosphate
  modified_base 12: mod_base = OTHER; note = 2'-O-methyluridine-3'-phosphate
  modified_base 13: mod_base = OTHER; note = 2'-O-methylguanosine-3'-phosphate
  modified_base 14: mod_base = OTHER; note = 2'-deoxy-2'-fluorouridine-3'-phosphate
  modified_base 15: mod_base = OTHER; note = 2'-O-methyluridine-3'-phosphate
  modified_base 16: mod_base = OTHER; note = 2'-deoxy-2'-fluoroguanosine-3'-phosphate
  modified_base 17: mod_base = OTHER; note = 2'-O-methyladenosine-3'-phosphate
  modified_base 18: mod_base = OTHER; note = 2'-O-methyladenosine-3'-phosphate
  modified_base 19: mod_base = OTHER; note = 2'-O-methylguanosine-3'-phosphate
  modified_base 20: mod_base = OTHER; note = 2'-O-methyladenosine-3'-phosphate
  modified_base 21: mod_base = OTHER; note = 2'-O-methylcytidine-3'-phosphate
  modified_base 22: mod_base = OTHER; note = 2'-O-methylcytidine-3'-phosphate
  modified_base 23: mod_base = OTHER; note = 2'-O-methyladenosine
tagcatgaaaatgttgaagacca

SEQ ID NO: 5436 - RNA, 23 nt, synthetic construct
  source 1..23: mol_type = other RNA
  modified_base 1: mod_base = OTHER; note = 2'-O-methyluridine-3'-phosphate 5'phosphate
  modified_base 2: mod_base = OTHER; note = 2'-deoxy-2'-fluoroadenosine-3'-phosphate
  modified_base 3: mod_base = OTHER; note = 2'-O-methylguanosine-3'-phosphate
  modified_base 4: mod_base = OTHER; note = 2'-O-methyladenosine-3'-phosphate
  modified_base 5: mod_base = OTHER; note = 2'-O-methylguanosine-3'-phosphate
  modified_base 6: mod_base = OTHER; note = 2'-deoxy-2'-fluorocytidine-3'-phosphate
  modified_base 7: mod_base = OTHER; note = 2'-O-methyladenosine-3'-phosphate
  modified_base 8: mod_base = OTHER; note = 2'-O-methyluridine-3'-phosphate
  modified_base 9: mod_base = OTHER; note = 2'-O-methylguanosine-3'-phosphate
  modified_base 10: mod_base = OTHER; note = 2'-O-methyladenosine-3'-phosphate
  modified_base 11: mod_base = OTHER; note = 2'-O-methyladenosine-3'-phosphate
  modified_base 12: mod_base = OTHER; note = 2'-O-methyladenosine-3'-phosphate
  modified_base 13: mod_base = OTHER; note = 2'-O-methyladenosine-3'-phosphate
  modified_base 14: mod_base = OTHER; note = 2'-deoxy-2'-fluorouridine-3'-phosphate
  modified_base 15: mod_base = OTHER; note = 2'-O-methylguanosine-3'-phosphate
  modified_base 16: mod_base = OTHER; note = 2'-deoxy-2'-fluorouridine-3'-phosphate
  modified_base 17: mod_base = OTHER; note = 2'-O-methyluridine-3'-phosphate
  modified_base 18: mod_base = OTHER; note = 2'-O-methylguanosine-3'-phosphate
  modified_base 19: mod_base = OTHER; note = 2'-O-methyladenosine-3'-phosphate
  modified_base 20: mod_base = OTHER; note = 2'-O-methyladenosine-3'-phosphate
  modified_base 21: mod_base = OTHER; note = 2'-O-methylguanosine-3'-phosphate
  modified_base 22: mod_base = OTHER; note = 2'-O-methyladenosine-3'-phosphate
  modified_base 23: mod_base = OTHER; note = 2'-O-methylcytidine
tagagcatgaaaatgttgaagac

SEQ ID NO: 5437 - RNA, 23 nt, synthetic construct
  source 1..23: mol_type = other RNA
  modified_base 1: mod_base = OTHER; note = 2'-O-methyluridine-3'-phosphate 5'phosphate
  modified_base 2: mod_base = OTHER; note = 2'-deoxy-2'-fluoroadenosine-3'-phosphate
  modified_base 3: mod_base = OTHER; note = 2'-O-methyladenosine-3'-phosphate
  modified_base 4: mod_base = OTHER; note = 2'-O-methylguanosine-3'-phosphate
  modified_base 5: mod_base = OTHER; note = 2'-O-methyladenosine-3'-phosphate
  modified_base 6: mod_base = OTHER; note = 2'-deoxy-2'-fluoroguanosine-3'-phosphate
  modified_base 7: mod_base = OTHER; note = 2'-O-methylcytidine-3'-phosphate
  modified_base 8: mod_base = OTHER; note = 2'-O-methyladenosine-3'-phosphate
  modified_base 9: mod_base = OTHER; note = 2'-O-methyluridine-3'-phosphate
  modified_base 10: mod_base = OTHER; note = 2'-O-methylguanosine-3'-phosphate
  modified_base 11: mod_base = OTHER; note = 2'-O-methyladenosine-3'-phosphate
  modified_base 12: mod_base = OTHER; note = 2'-O-methyladenosine-3'-phosphate
  modified_base 13: mod_base = OTHER; note = 2'-O-methyladenosine-3'-phosphate
  modified_base 14: mod_base = OTHER; note = 2'-deoxy-2'-fluoroadenosine-3'-phosphate
  modified_base 15: mod_base = OTHER; note = 2'-O-methyluridine-3'-phosphate
  modified_base 16: mod_base = OTHER; note = 2'-deoxy-2'-fluoroguanosine-3'-phosphate
  modified_base 17: mod_base = OTHER; note = 2'-O-methyluridine-3'-phosphate
  modified_base 18: mod_base = OTHER; note = 2'-O-methyluridine-3'-phosphate
  modified_base 19: mod_base = OTHER; note = 2'-O-methylguanosine-3'-phosphate
  modified_base 20: mod_base = OTHER; note = 2'-O-methyladenosine-3'-phosphate
  modified_base 21: mod_base = OTHER; note = 2'-O-methyladenosine-3'-phosphate
  modified_base 22: mod_base = OTHER; note = 2'-O-methylguanosine-3'-phosphate
  modified_base 23: mod_base = OTHER; note = 2'-O-methyladenosine
taagagcatgaaaatgttgaaga

SEQ ID NO: 5438 - RNA, 23 nt, synthetic construct
  source 1..23: mol_type = other RNA
  modified_base 1: mod_base = OTHER; note = 2'-O-methyluridine-3'-phosphate 5'phosphate
  modified_base 2: mod_base = OTHER; note = 2'-deoxy-2'-fluoroadenosine-3'-phosphate
  modified_base 3: mod_base = OTHER; note = 2'-O-methyladenosine-3'-phosphate
  modified_base 4: mod_base = OTHER; note = 2'-O-methyladenosine-3'-phosphate
  modified_base 5: mod_base = OTHER; note = 2'-O-methylguanosine-3'-phosphate
  modified_base 6: mod_base = OTHER; note = 2'-deoxy-2'-fluoroadenosine-3'-phosphate
  modified_base 7: mod_base = OTHER; note = 2'-O-methylguanosine-3'-phosphate
  modified_base 8: mod_base = OTHER; note = 2'-O-methylcytidine-3'-phosphate
  modified_base 9: mod_base = OTHER; note = 2'-O-methyladenosine-3'-phosphate
  modified_base 10: mod_base = OTHER; note = 2'-O-methyluridine-3'-phosphate
  modified_base 11: mod_base = OTHER; note = 2'-O-methylguanosine-3'-phosphate
  modified_base 12: mod_base = OTHER; note = 2'-O-methyladenosine-3'-phosphate
  modified_base 13: mod_base = OTHER; note = 2'-O-methyladenosine-3'-phosphate
  modified_base 14: mod_base = OTHER; note = 2'-deoxy-2'-fluoroadenosine-3'-phosphate
  modified_base 15: mod_base = OTHER; note = 2'-O-methyladenosine-3'-phosphate
  modified_base 16: mod_base = OTHER; note = 2'-deoxy-2'-fluorouridine-3'-phosphate
  modified_base 17: mod_base = OTHER; note = 2'-O-methylguanosine-3'-phosphate
  modified_base 18: mod_base = OTHER; note = 2'-O-methyluridine-3'-phosphate
  modified_base 19: mod_base = OTHER; note = 2'-O-methyluridine-3'-phosphate
  modified_base 20: mod_base = OTHER; note = 2'-O-methylguanosine-3'-phosphate
  modified_base 21: mod_base = OTHER; note = 2'-O-methyladenosine-3'-phosphate
  modified_base 22: mod_base = OTHER; note = 2'-O-methyladenosine-3'-phosphate
  modified_base 23: mod_base = OTHER; note = 2'-O-methylguanosine
taaagagcatgaaaatgttgaag

SEQ ID NO: 5439 - RNA, 23 nt, synthetic construct
  source 1..23: mol_type = other RNA
  modified_base 1: mod_base = OTHER; note = 2'-O-methyluridine-3'-phosphate 5'phosphate
  modified_base 2: mod_base = OTHER; note = 2'-deoxy-2'-fluorocytidine-3'-phosphate
  modified_base 3: mod_base = OTHER; note = 2'-O-methyladenosine-3'-phosphate
  modified_base 4: mod_base = OTHER; note = 2'-O-methyladenosine-3'-phosphate
  modified_base 5: mod_base = OTHER; note = 2'-O-methyladenosine-3'-phosphate
  modified_base 6: mod_base = OTHER; note = 2'-deoxy-2'-fluoroguanosine-3'-phosphate
  modified_base 7: mod_base = OTHER; note = 2'-O-methyladenosine-3'-phosphate
  modified_base 8: mod_base = OTHER; note = 2'-O-methylguanosine-3'-phosphate
  modified_base 9: mod_base = OTHER; note = 2'-O-methylcytidine-3'-phosphate
  modified_base 10: mod_base = OTHER; note = 2'-O-methyladenosine-3'-phosphate
  modified_base 11: mod_base = OTHER; note = 2'-O-methyluridine-3'-phosphate
  modified_base 12: mod_base = OTHER; note = 2'-O-methylguanosine-3'-phosphate
  modified_base 13: mod_base = OTHER; note = 2'-O-methyladenosine-3'-phosphate
  modified_base 14: mod_base = OTHER; note = 2'-deoxy-2'-fluoroadenosine-3'-phosphate
  modified_base 15: mod_base = OTHER; note = 2'-O-methyladenosine-3'-phosphate
  modified_base 16: mod_base = OTHER; note = 2'-deoxy-2'-fluoroadenosine-3'-phosphate
  modified_base 17: mod_base = OTHER; note = 2'-O-methyluridine-3'-phosphate
  modified_base 18: mod_base = OTHER; note = 2'-O-methylguanosine-3'-phosphate
  modified_base 19: mod_base = OTHER; note = 2'-O-methyluridine-3'-phosphate
  modified_base 20: mod_base = OTHER; note = 2'-O-methyluridine-3'-phosphate
  modified_base 21: mod_base = OTHER; note = 2'-O-methylguanosine-3'-phosphate
  modified_base 22: mod_base = OTHER; note = 2'-O-methyladenosine-3'-phosphate
  modified_base 23: mod_base = OTHER; note = 2'-O-methyladenosine
tcaaagagcatgaaaatgttgaa

SEQ ID NO: 5440 - RNA, 23 nt, synthetic construct
  source 1..23: mol_type = other RNA
  modified_base 1: mod_base = OTHER; note = 2'-O-methyluridine-3'-phosphate 5'phosphate
  modified_base 2: mod_base = OTHER; note = 2'-deoxy-2'-fluoroadenosine-3'-phosphate
  modified_base 3: mod_base = OTHER; note = 2'-O-methylcytidine-3'-phosphate
  modified_base 4: mod_base = OTHER; note = 2'-O-methyladenosine-3'-phosphate
  modified_base 5: mod_base = OTHER; note = 2'-O-methyladenosine-3'-phosphate
  modified_base 6: mod_base = OTHER; note = 2'-deoxy-2'-fluoroadenosine-3'-phosphate
  modified_base 7: mod_base = OTHER; note = 2'-O-methylguanosine-3'-phosphate
  modified_base 8: mod_base = OTHER; note = 2'-O-methyladenosine-3'-phosphate
  modified_base 9: mod_base = OTHER; note = 2'-O-methylguanosine-3'-phosphate
  modified_base 10: mod_base = OTHER; note = 2'-O-methylcytidine-3'-phosphate
  modified_base 11: mod_base = OTHER; note = 2'-O-methyladenosine-3'-phosphate
  modified_base 12: mod_base = OTHER; note = 2'-O-methyluridine-3'-phosphate
  modified_base 13: mod_base = OTHER; note = 2'-O-methylguanosine-3'-phosphate
  modified_base 14: mod_base = OTHER; note = 2'-deoxy-2'-fluoroadenosine-3'-phosphate
  modified_base 15: mod_base = OTHER; note = 2'-O-methyladenosine-3'-phosphate
  modified_base 16: mod_base = OTHER; note = 2'-deoxy-2'-fluoroadenosine-3'-phosphate
  modified_base 17: mod_base = OTHER; note = 2'-O-methyladenosine-3'-phosphate
  modified_base 18: mod_base = OTHER; note = 2'-O-methyluridine-3'-phosphate
  modified_base 19: mod_base = OTHER; note = 2'-O-methylguanosine-3'-phosphate
  modified_base 20: mod_base = OTHER; note = 2'-O-methyluridine-3'-phosphate
  modified_base 21: mod_base = OTHER; note = 2'-O-methyluridine-3'-phosphate
  modified_base 22: mod_base = OTHER; note = 2'-O-methylguanosine-3'-phosphate
  modified_base 23: mod_base = OTHER; note = 2'-O-methyladenosine
tacaaagagcatgaaaatgttga

SEQ ID NO: 5441 - RNA, 23 nt, synthetic construct
  source 1..23: mol_type = other RNA
  modified_base 1: mod_base = OTHER; note = 2'-O-methyluridine-3'-phosphate 5'phosphate
  modified_base 2: mod_base = OTHER; note = 2'-deoxy-2'-fluoroadenosine-3'-phosphate
  modified_base 3: mod_base = OTHER; note = 2'-O-methyladenosine-3'-phosphate
  modified_base 4: mod_base = OTHER; note = 2'-O-methylcytidine-3'-phosphate
  modified_base 5: mod_base = OTHER; note = 2'-O-methyladenosine-3'-phosphate
  modified_base 6: mod_base = OTHER; note = 2'-deoxy-2'-fluoroadenosine-3'-phosphate
  modified_base 7: mod_base = OTHER; note = 2'-O-methyladenosine-3'-phosphate
  modified_base 8: mod_base = OTHER; note = 2'-O-methylguanosine-3'-phosphate
  modified_base 9: mod_base = OTHER; note = 2'-O-methyladenosine-3'-phosphate
  modified_base 10: mod_base = OTHER; note = 2'-O-methylguanosine-3'-phosphate
  modified_base 11: mod_base = OTHER; note = 2'-O-methylcytidine-3'-phosphate
  modified_base 12: mod_base = OTHER; note = 2'-O-methyladenosine-3'-phosphate
  modified_base 13: mod_base = OTHER; note = 2'-O-methyluridine-3'-phosphate
  modified_base 14: mod_base = OTHER; note = 2'-deoxy-2'-fluoroguanosine-3'-phosphate
  modified_base 15: mod_base = OTHER; note = 2'-O-methyladenosine-3'-phosphate
  modified_base 16: mod_base = OTHER; note = 2'-deoxy-2'-fluoroadenosine-3'-phosphate
  modified_base 17: mod_base = OTHER; note = 2'-O-methyladenosine-3'-phosphate
  modified_base 18: mod_base = OTHER; note = 2'-O-methyladenosine-3'-phosphate
  modified_base 19: mod_base = OTHER; note = 2'-O-methyluridine-3'-phosphate
  modified_base 20: mod_base = OTHER; note = 2'-O-methylguanosine-3'-phosphate
  modified_base 21: mod_base = OTHER; note = 2'-O-methyluridine-3'-phosphate
  modified_base 22: mod_base = OTHER; note = 2'-O-methyluridine-3'-phosphate
  modified_base 23: mod_base = OTHER; note = 2'-O-methylguanosine
taacaaagagcatgaaaatgttg

SEQ ID NO: 5442 - RNA, 23 nt, synthetic construct
  source 1..23: mol_type = other RNA
  modified_base 1: mod_base = OTHER; note = 2'-O-methyluridine-3'-phosphate 5'phosphate
  modified_base 2: mod_base = OTHER; note = 2'-deoxy-2'-fluoroguanosine-3'-phosphate
  modified_base 3: mod_base = OTHER; note = 2'-O-methyladenosine-3'-phosphate
  modified_base 4: mod_base = OTHER; note = 2'-O-methyladenosine-3'-phosphate
  modified_base 5: mod_base = OTHER; note = 2'-O-methylcytidine-3'-phosphate
  modified_base 6: mod_base = OTHER; note = 2'-deoxy-2'-fluoroadenosine-3'-phosphate
  modified_base 7: mod_base = OTHER; note = 2'-O-methyladenosine-3'-phosphate
  modified_base 8: mod_base = OTHER; note = 2'-O-methyladenosine-3'-phosphate
  modified_base 9: mod_base = OTHER; note = 2'-O-methylguanosine-3'-phosphate
  modified_base 10: mod_base = OTHER; note = 2'-O-methyladenosine-3'-phosphate
  modified_base 11: mod_base = OTHER; note = 2'-O-methylguanosine-3'-phosphate
  modified_base 12: mod_base = OTHER; note = 2'-O-methylcytidine-3'-phosphate
  modified_base 13: mod_base = OTHER; note = 2'-O-methyladenosine-3'-phosphate
  modified_base 14: mod_base = OTHER; note = 2'-deoxy-2'-fluorouridine-3'-phosphate
  modified_base 15: mod_base = OTHER; note = 2'-O-methylguanosine-3'-phosphate
  modified_base 16: mod_base = OTHER; note = 2'-deoxy-2'-fluoroadenosine-3'-phosphate
  modified_base 17: mod_base = OTHER; note = 2'-O-methyladenosine-3'-phosphate
  modified_base 18: mod_base = OTHER; note = 2'-O-methyladenosine-3'-phosphate
  modified_base 19: mod_base = OTHER; note = 2'-O-methyladenosine-3'-phosphate
  modified_base 20: mod_base = OTHER; note = 2'-O-methyluridine-3'-phosphate
  modified_base 21: mod_base = OTHER; note = 2'-O-methylguanosine-3'-phosphate
  modified_base 22: mod_base = OTHER; note = 2'-O-methyluridine-3'-phosphate
  modified_base 23: mod_base = OTHER; note = 2'-O-methyluridine
tgaacaaagagcatgaaaatgtt

SEQ ID NO: 5443 - RNA, 23 nt, synthetic construct
  source 1..23: mol_type = other RNA
  modified_base 1: mod_base = OTHER; note = 2'-O-methyluridine-3'-phosphate 5'phosphate
  modified_base 2: mod_base = OTHER; note = 2'-deoxy-2'-fluorouridine-3'-phosphate
  modified_base 3: mod_base = OTHER; note = 2'-O-methylguanosine-3'-phosphate
  modified_base 4: mod_base = OTHER; note = 2'-O-methyladenosine-3'-phosphate
  modified_base 5: mod_base = OTHER; note = 2'-O-methyladenosine-3'-phosphate
  modified_base 6: mod_base = OTHER; note = 2'-deoxy-2'-fluorocytidine-3'-phosphate
  modified_base 7: mod_base = OTHER; note = 2'-O-methyladenosine-3'-phosphate
  modified_base 8: mod_base = OTHER; note = 2'-O-methyladenosine-3'-phosphate
  modified_base 9: mod_base = OTHER; note = 2'-O-methyladenosine-3'-phosphate
  modified_base 10: mod_base = OTHER; note = 2'-O-methylguanosine-3'-phosphate
  modified_base 11: mod_base = OTHER; note = 2'-O-methyladenosine-3'-phosphate
  modified_base 12: mod_base = OTHER; note = 2'-O-methylguanosine-3'-phosphate
  modified_base 13: mod_base = OTHER; note = 2'-O-methylcytidine-3'-phosphate
  modified_base 14: mod_base = OTHER; note = 2'-deoxy-2'-fluoroadenosine-3'-phosphate
  modified_base 15: mod_base = OTHER; note = 2'-O-methyluridine-3'-phosphate
  modified_base 16: mod_base = OTHER; note = 2'-deoxy-2'-fluoroguanosine-3'-phosphate
  modified_base 17: mod_base = OTHER; note = 2'-O-methyladenosine-3'-phosphate
  modified_base 18: mod_base = OTHER; note = 2'-O-methyladenosine-3'-phosphate
  modified_base 19: mod_base = OTHER; note = 2'-O-methyladenosine-3'-phosphate
  modified_base 20: mod_base = OTHER; note = 2'-O-methyladenosine-3'-phosphate
  modified_base 21: mod_base = OTHER; note = 2'-O-methyluridine-3'-phosphate
  modified_base 22: mod_base = OTHER; note = 2'-O-methylguanosine-3'-phosphate
  modified_base 23: mod_base = OTHER; note = 2'-O-methyluridine
ttgaacaaagagcatgaaaatgt

SEQ ID NO: 5444 - RNA, 23 nt, synthetic construct
  source 1..23: mol_type = other RNA
  modified_base 1: mod_base = OTHER; note = 2'-O-methyluridine-3'-phosphate 5'phosphate
  modified_base 2: mod_base = OTHER; note = 2'-deoxy-2'-fluoroguanosine-3'-phosphate
  modified_base 3: mod_base = OTHER; note = 2'-O-methyluridine-3'-phosphate
  modified_base 4: mod_base = OTHER; note = 2'-O-methylguanosine-3'-phosphate
  modified_base 5: mod_base = OTHER; note = 2'-O-methyladenosine-3'-phosphate
  modified_base 6: mod_base = OTHER; note = 2'-deoxy-2'-fluoroadenosine-3'-phosphate
  modified_base 7: mod_base = OTHER; note = 2'-O-methylcytidine-3'-phosphate
  modified_base 8: mod_base = OTHER; note = 2'-O-methyladenosine-3'-phosphate
  modified_base 9: mod_base = OTHER; note = 2'-O-methyladenosine-3'-phosphate
  modified_base 10: mod_base = OTHER; note = 2'-O-methyladenosine-3'-phosphate
  modified_base 11: mod_base = OTHER; note = 2'-O-methylguanosine-3'-phosphate
  modified_base 12: mod_base = OTHER; note = 2'-O-methyladenosine-3'-phosphate
  modified_base 13: mod_base = OTHER; note = 2'-O-methylguanosine-3'-phosphate
  modified_base 14: mod_base = OTHER; note = 2'-deoxy-2'-fluorocytidine-3'-phosphate
  modified_base 15: mod_base = OTHER; note = 2'-O-methyladenosine-3'-phosphate
  modified_base 16: mod_base = OTHER; note = 2'-deoxy-2'-fluorouridine-3'-phosphate
  modified_base 17: mod_base = OTHER; note = 2'-O-methylguanosine-3'-phosphate
  modified_base 18: mod_base = OTHER; note = 2'-O-methyladenosine-3'-phosphate
  modified_base 19: mod_base = OTHER; note = 2'-O-methyladenosine-3'-phosphate
  modified_base 20: mod_base = OTHER; note = 2'-O-methyladenosine-3'-phosphate
  modified_base 21: mod_base = OTHER; note = 2'-O-methyladenosine-3'-phosphate
  modified_base 22: mod_base = OTHER; note = 2'-O-methyluridine-3'-phosphate
  modified_base 23: mod_base = OTHER; note = 2'-O-methylguanosine
tgtgaacaaagagcatgaaaatg

SEQ ID NO: 5445 - RNA, 23 nt, synthetic construct
  source 1..23: mol_type = other RNA
  modified_base 1: mod_base = OTHER; note = 2'-O-methyluridine-3'-phosphate 5'phosphate
  modified_base 2: mod_base = OTHER; note = 2'-deoxy-2'-fluoroguanosine-3'-phosphate
  modified_base 3: mod_base = OTHER; note = 2'-O-methylguanosine-3'-phosphate
  modified_base 4: mod_base = OTHER; note = 2'-O-methyluridine-3'-phosphate
  modified_base 5: mod_base = OTHER; note = 2'-O-methylguanosine-3'-phosphate
  modified_base 6: mod_base = OTHER; note = 2'-deoxy-2'-fluoroadenosine-3'-phosphate
  modified_base 7: mod_base = OTHER; note = 2'-O-methyladenosine-3'-phosphate
  modified_base 8: mod_base = OTHER; note = 2'-O-methylcytidine-3'-phosphate
  modified_base 9: mod_base = OTHER; note = 2'-O-methyladenosine-3'-phosphate
  modified_base 10: mod_base = OTHER; note = 2'-O-methyladenosine-3'-phosphate
  modified_base 11: mod_base = OTHER; note = 2'-O-methyladenosine-3'-phosphate
  modified_base 12: mod_base = OTHER; note = 2'-O-methylguanosine-3'-phosphate
  modified_base 13: mod_base = OTHER; note = 2'-O-methyladenosine-3'-phosphate
  modified_base 14: mod_base = OTHER; note = 2'-deoxy-2'-fluoroguanosine-3'-phosphate
  modified_base 15: mod_base = OTHER; note = 2'-O-methylcytidine-3'-phosphate
  modified_base 16: mod_base = OTHER; note = 2'-deoxy-2'-fluoroadenosine-3'-phosphate
  modified_base 17: mod_base = OTHER; note = 2'-O-methyluridine-3'-phosphate
  modified_base 18: mod_base = OTHER; note = 2'-O-methylguanosine-3'-phosphate
  modified_base 19: mod_base = OTHER; note = 2'-O-methyladenosine-3'-phosphate
  modified_base 20: mod_base = OTHER; note = 2'-O-methyladenosine-3'-phosphate
  modified_base 21: mod_base = OTHER; note = 2'-O-methyladenosine-3'-phosphate
  modified_base 22: mod_base = OTHER; note = 2'-O-methyladenosine-3'-phosphate
  modified_base 23: mod_base = OTHER; note = 2'-O-methyluridine
tggtgaacaaagagcatgaaaat

SEQ ID NO: 5446 - RNA, 23 nt, synthetic construct
  source 1..23: mol_type = other RNA
  modified_base 1: mod_base = OTHER; note = 2'-O-methyluridine-3'-phosphate 5'phosphate
  modified_base 2: mod_base = OTHER; note = 2'-deoxy-2'-fluorouridine-3'-phosphate
  modified_base 3: mod_base = OTHER; note = 2'-O-methyluridine-3'-phosphate
  modified_base 4: mod_base = OTHER; note = 2'-O-methyladenosine-3'-phosphate
  modified_base 5: mod_base = OTHER; note = 2'-O-methyluridine-3'-phosphate
  modified_base 6: mod_base = OTHER; note = 2'-deoxy-2'-fluorocytidine-3'-phosphate
  modified_base 7: mod_base = OTHER; note = 2'-O-methyladenosine-3'-phosphate
  modified_base 8: mod_base = OTHER; note = 2'-O-methyladenosine-3'-phosphate
  modified_base 9: mod_base = OTHER; note = 2'-O-methyladenosine-3'-phosphate
  modified_base 10: mod_base = OTHER; note = 2'-O-methyladenosine-3'-phosphate
  modified_base 11: mod_base = OTHER; note = 2'-O-methylguanosine-3'-phosphate
  modified_base 12: mod_base = OTHER; note = 2'-O-methylcytidine-3'-phosphate
  modified_base 13: mod_base = OTHER; note = 2'-O-methyladenosine-3'-phosphate
  modified_base 14: mod_base = OTHER; note = 2'-deoxy-2'-fluoroguanosine-3'-phosphate
  modified_base 15: mod_base = OTHER; note = 2'-O-methylcytidine-3'-phosphate
  modified_base 16: mod_base = OTHER; note = 2'-deoxy-2'-fluorouridine-3'-phosphate
  modified_base 17: mod_base = OTHER; note = 2'-O-methyladenosine-3'-phosphate
  modified_base 18: mod_base = OTHER; note = 2'-O-methyladenosine-3'-phosphate
  modified_base 19: mod_base = OTHER; note = 2'-O-methyladenosine-3'-phosphate
  modified_base 20: mod_base = OTHER; note = 2'-O-methyluridine-3'-phosphate
  modified_base 21: mod_base = OTHER; note = 2'-O-methylcytidine-3'-phosphate
  modified_base 22: mod_base = OTHER; note = 2'-O-methylcytidine-3'-phosphate
  modified_base 23: mod_base = OTHER; note = 2'-O-methylcytidine
tttatcaaaagcagctaaatccc

SEQ ID NO: 5447 - RNA, 23 nt, synthetic construct
  source 1..23: mol_type = other RNA
  modified_base 1: mod_base = OTHER; note = 2'-O-methyluridine-3'-phosphate 5'phosphate
  modified_base 2: mod_base = OTHER; note = 2'-deoxy-2'-fluorocytidine-3'-phosphate
  modified_base 3: mod_base = OTHER; note = 2'-O-methyluridine-3'-phosphate
  modified_base 4: mod_base = OTHER; note = 2'-O-methyluridine-3'-phosphate
  modified_base 5: mod_base = OTHER; note = 2'-O-methyladenosine-3'-phosphate
  modified_base 6: mod_base = OTHER; note = 2'-deoxy-2'-fluorouridine-3'-phosphate
  modified_base 7: mod_base = OTHER; note = 2'-O-methylcytidine-3'-phosphate
  modified_base 8: mod_base = OTHER; note = 2'-O-methyladenosine-3'-phosphate
  modified_base 9: mod_base = OTHER; note = 2'-O-methyladenosine-3'-phosphate
  modified_base 10: mod_base = OTHER; note = 2'-O-methyladenosine-3'-phosphate
  modified_base 11: mod_base = OTHER; note = 2'-O-methyladenosine-3'-phosphate
  modified_base 12: mod_base = OTHER; note = 2'-O-methylguanosine-3'-phosphate
  modified_base 13: mod_base = OTHER; note = 2'-O-methylcytidine-3'-phosphate
  modified_base 14: mod_base = OTHER; note = 2'-deoxy-2'-fluoroadenosine-3'-phosphate
  modified_base 15: mod_base = OTHER; note = 2'-O-methylguanosine-3'-phosphate
  modified_base 16: mod_base = OTHER; note = 2'-deoxy-2'-fluorocytidine-3'-phosphate
  modified_base 17: mod_base = OTHER; note = 2'-O-methyluridine-3'-phosphate
  modified_base 18: mod_base = OTHER; note = 2'-O-methyladenosine-3'-phosphate
  modified_base 19: mod_base = OTHER; note = 2'-O-methyladenosine-3'-phosphate
  modified_base 20: mod_base = OTHER; note = 2'-O-methyladenosine-3'-phosphate
  modified_base 21: mod_base = OTHER; note = 2'-O-methyluridine-3'-phosphate
  modified_base 22: mod_base = OTHER; note = 2'-O-methylcytidine-3'-phosphate
  modified_base 23: mod_base = OTHER; note = 2'-O-methylcytidine
tcttatcaaaagcagctaaatcc

SEQ ID NO: 5448 - RNA, 23 nt, synthetic construct
  source 1..23: mol_type = other RNA
  modified_base 1: mod_base = OTHER; note = 2'-O-methyluridine-3'-phosphate 5'phosphate
  modified_base 2: mod_base = OTHER; note = 2'-deoxy-2'-fluorouridine-3'-phosphate
  modified_base 3: mod_base = OTHER; note = 2'-O-methylcytidine-3'-phosphate
  modified_base 4: mod_base = OTHER; note = 2'-O-methylcytidine-3'-phosphate
  modified_base 5: mod_base = OTHER; note = 2'-O-methyluridine-3'-phosphate
  modified_base 6: mod_base = OTHER; note = 2'-deoxy-2'-fluorouridine-3'-phosphate
  modified_base 7: mod_base = OTHER; note = 2'-O-methyladenosine-3'-phosphate
  modified_base 8: mod_base = OTHER; note = 2'-O-methyluridine-3'-phosphate
  modified_base 9: mod_base = OTHER; note = 2'-O-methylcytidine-3'-phosphate
  modified_base 10: mod_base = OTHER; note = 2'-O-methyladenosine-3'-phosphate
  modified_base 11: mod_base = OTHER; note = 2'-O-methyladenosine-3'-phosphate
  modified_base 12: mod_base = OTHER; note = 2'-O-methyladenosine-3'-phosphate
  modified_base 13: mod_base = OTHER; note = 2'-O-methyladenosine-3'-phosphate
  modified_base 14: mod_base = OTHER; note = 2'-deoxy-2'-fluoroguanosine-3'-phosphate
  modified_base 15: mod_base = OTHER; note = 2'-O-methylcytidine-3'-phosphate
  modified_base 16: mod_base = OTHER; note = 2'-deoxy-2'-fluoroadenosine-3'-phosphate
  modified_base 17: mod_base = OTHER; note = 2'-O-methylguanosine-3'-phosphate
  modified_base 18: mod_base = OTHER; note = 2'-O-methylcytidine-3'-phosphate
  modified_base 19: mod_base = OTHER; note = 2'-O-methyluridine-3'-phosphate
  modified_base 20: mod_base = OTHER; note = 2'-O-methyladenosine-3'-phosphate
  modified_base 21: mod_base = OTHER; note = 2'-O-methyladenosine-3'-phosphate
  modified_base 22: mod_base = OTHER; note = 2'-O-methyladenosine-3'-phosphate
  modified_base 23: mod_base = OTHER; note = 2'-O-methyluridine
ttccttatcaaaagcagctaaat

SEQ ID NO: 5449 - RNA, 23 nt, synthetic construct
  source 1..23: mol_type = other RNA
  modified_base 1: mod_base = OTHER; note = 2'-O-methyluridine-3'-phosphate 5'phosphate
  modified_base 2: mod_base = OTHER; note = 2'-deoxy-2'-fluorouridine-3'-phosphate
  modified_base 3: mod_base = OTHER; note = 2'-O-methyluridine-3'-phosphate
  modified_base 4: mod_base = OTHER; note = 2'-O-methylcytidine-3'-phosphate
  modified_base 5: mod_base = OTHER; note = 2'-O-methylcytidine-3'-phosphate
  modified_base 6: mod_base = OTHER; note = 2'-deoxy-2'-fluorouridine-3'-phosphate
  modified_base 7: mod_base = OTHER; note = 2'-O-methyluridine-3'-phosphate
  modified_base 8: mod_base = OTHER; note = 2'-O-methyladenosine-3'-phosphate
  modified_base 9: mod_base = OTHER; note = 2'-O-methyluridine-3'-phosphate
  modified_base 10: mod_base = OTHER; note = 2'-O-methylcytidine-3'-phosphate
  modified_base 11: mod_base = OTHER; note = 2'-O-methyladenosine-3'-phosphate
  modified_base 12: mod_base = OTHER; note = 2'-O-methyladenosine-3'-phosphate
  modified_base 13: mod_base = OTHER; note = 2'-O-methyladenosine-3'-phosphate
  modified_base 14: mod_base = OTHER; note = 2'-deoxy-2'-fluoroadenosine-3'-phosphate
  modified_base 15: mod_base = OTHER; note = 2'-O-methylguanosine-3'-phosphate
  modified_base 16: mod_base = OTHER; note = 2'-deoxy-2'-fluorocytidine-3'-phosphate
  modified_base 17: mod_base = OTHER; note = 2'-O-methyladenosine-3'-phosphate
  modified_base 18: mod_base = OTHER; note = 2'-O-methylguanosine-3'-phosphate
  modified_base 19: mod_base = OTHER; note = 2'-O-methylcytidine-3'-phosphate
  modified_base 20: mod_base = OTHER; note = 2'-O-methyluridine-3'-phosphate
  modified_base 21: mod_base = OTHER; note = 2'-O-methyladenosine-3'-phosphate
  modified_base 22: mod_base = OTHER; note = 2'-O-methyladenosine-3'-phosphate
  modified_base 23: mod_base = OTHER; note = 2'-O-methyladenosine
tttccttatcaaaagcagctaaa

SEQ ID NO: 5450 - RNA, 23 nt, synthetic construct
  source 1..23: mol_type = other RNA
  modified_base 1: mod_base = OTHER; note = 2'-O-methyluridine-3'-phosphate 5'phosphate
  modified_base 2: mod_base = OTHER; note = 2'-deoxy-2'-fluoroguanosine-3'-phosphate
  modified_base 3: mod_base = OTHER; note = 2'-O-methyluridine-3'-phosphate
  modified_base 4: mod_base = OTHER; note = 2'-O-methyluridine-3'-phosphate
  modified_base 5: mod_base = OTHER; note = 2'-O-methylcytidine-3'-phosphate
  modified_base 6: mod_base = OTHER; note = 2'-deoxy-2'-fluorocytidine-3'-phosphate
  modified_base 7: mod_base = OTHER; note = 2'-O-methyluridine-3'-phosphate
  modified_base 8: mod_base = OTHER; note = 2'-O-methyluridine-3'-phosphate
  modified_base 9: mod_base = OTHER; note = 2'-O-methyladenosine-3'-phosphate
  modified_base 10: mod_base = OTHER; note = 2'-O-methyluridine-3'-phosphate
  modified_base 11: mod_base = OTHER; note = 2'-O-methylcytidine-3'-phosphate
  modified_base 12: mod_base = OTHER; note = 2'-O-methyladenosine-3'-phosphate
  modified_base 13: mod_base = OTHER; note = 2'-O-methyladenosine-3'-phosphate
  modified_base 14: mod_base = OTHER; note = 2'-deoxy-2'-fluoroadenosine-3'-phosphate
  modified_base 15: mod_base = OTHER; note = 2'-O-methyladenosine-3'-phosphate
  modified_base 16: mod_base = OTHER; note = 2'-deoxy-2'-fluoroguanosine-3'-phosphate
  modified_base 17: mod_base = OTHER; note = 2'-O-methylcytidine-3'-phosphate
  modified_base 18: mod_base = OTHER; note = 2'-O-methyladenosine-3'-phosphate
  modified_base 19: mod_base = OTHER; note = 2'-O-methylguanosine-3'-phosphate
  modified_base 20: mod_base = OTHER; note = 2'-O-methylcytidine-3'-phosphate
  modified_base 21: mod_base = OTHER; note = 2'-O-methyluridine-3'-phosphate
  modified_base 22: mod_base = OTHER; note = 2'-O-methyladenosine-3'-phosphate
  modified_base 23: mod_base = OTHER; note = 2'-O-methyladenosine
tgttccttatcaaaagcagctaa

SEQ ID NO: 5451 - RNA, 23 nt, synthetic construct
  source 1..23: mol_type = other RNA
  modified_base 1: mod_base = OTHER; note = 2'-O-methyluridine-3'-phosphate 5'phosphate
  modified_base 2: mod_base = OTHER; note = 2'-deoxy-2'-fluorouridine-3'-phosphate
  modified_base 3: mod_base = OTHER; note = 2'-O-methylguanosine-3'-phosphate
  modified_base 4: mod_base = OTHER; note = 2'-O-methyluridine-3'-phosphate
  modified_base 5: mod_base = OTHER; note = 2'-O-methyluridine-3'-phosphate
  modified_base 6: mod_base = OTHER; note = 2'-deoxy-2'-fluorocytidine-3'-phosphate
  modified_base 7: mod_base = OTHER; note = 2'-O-methylcytidine-3'-phosphate
  modified_base 8: mod_base = OTHER; note = 2'-O-methyluridine-3'-phosphate
  modified_base 9: mod_base = OTHER; note = 2'-O-methyluridine-3'-phosphate
  modified_base 10: mod_base = OTHER; note = 2'-O-methyladenosine-3'-phosphate
  modified_base 11: mod_base = OTHER; note = 2'-O-methyluridine-3'-phosphate
  modified_base 12: mod_base = OTHER; note = 2'-O-methylcytidine-3'-phosphate
  modified_base 13: mod_base = OTHER; note = 2'-O-methyladenosine-3'-phosphate
  modified_base 14: mod_base = OTHER; note = 2'-deoxy-2'-fluoroadenosine-3'-phosphate
  modified_base 15: mod_base = OTHER; note = 2'-O-methyladenosine-3'-phosphate
  modified_base 16: mod_base = OTHER; note = 2'-deoxy-2'-fluoroadenosine-3'-phosphate
  modified_base 17: mod_base = OTHER; note = 2'-O-methylguanosine-3'-phosphate
  modified_base 18: mod_base = OTHER; note = 2'-O-methylcytidine-3'-phosphate
  modified_base 19: mod_base = OTHER; note = 2'-O-methyladenosine-3'-phosphate
  modified_base 20: mod_base = OTHER; note = 2'-O-methylguanosine-3'-phosphate
  modified_base 21: mod_base = OTHER; note = 2'-O-methylcytidine-3'-phosphate
  modified_base 22: mod_base = OTHER; note = 2'-O-methyluridine-3'-phosphate
  modified_base 23: mod_base = OTHER; note = 2'-O-methyladenosine
ttgttccttatcaaaagcagcta

SEQ ID NO: 5452 - RNA, 23 nt, synthetic construct
  source 1..23: mol_type = other RNA
  modified_base 1: mod_base = OTHER; note = 2'-O-methyluridine-3'-phosphate 5'phosphate
  modified_base 2: mod_base = OTHER; note = 2'-deoxy-2'-fluorouridine-3'-phosphate
  modified_base 3: mod_base = OTHER; note = 2'-O-methyluridine-3'-phosphate
  modified_base 4: mod_base = OTHER; note = 2'-O-methyluridine-3'-phosphate
  modified_base 5: mod_base = OTHER; note = 2'-O-methylguanosine-3'-phosphate
  modified_base 6: mod_base = OTHER; note = 2'-deoxy-2'-fluorouridine-3'-phosphate
  modified_base 7: mod_base = OTHER; note = 2'-O-methylguanosine-3'-phosphate
  modified_base 8: mod_base = OTHER; note = 2'-O-methylcytidine-3'-phosphate
  modified_base 9: mod_base = OTHER; note = 2'-O-methyladenosine-3'-phosphate
  modified_base 10: mod_base = OTHER; note = 2'-O-methylguanosine-3'-phosphate
  modified_base 11: mod_base = OTHER; note = 2'-O-methylcytidine-3'-phosphate
  modified_base 12: mod_base = OTHER; note = 2'-O-methyluridine-3'-phosphate
  modified_base 13: mod_base = OTHER; note = 2'-O-methylguanosine-3'-phosphate
  modified_base 14: mod_base = OTHER; note = 2'-deoxy-2'-fluorouridine-3'-phosphate
  modified_base 15: mod_base = OTHER; note = 2'-O-methyluridine-3'-phosphate
  modified_base 16: mod_base = OTHER; note = 2'-deoxy-2'-fluorocytidine-3'-phosphate
  modified_base 17: mod_base = OTHER; note = 2'-O-methylcytidine-3'-phosphate
  modified_base 18: mod_base = OTHER; note = 2'-O-methyluridine-3'-phosphate
  modified_base 19: mod_base = OTHER; note = 2'-O-methyluridine-3'-phosphate
  modified_base 20: mod_base = OTHER; note = 2'-O-methyladenosine-3'-phosphate
  modified_base 21: mod_base = OTHER; note = 2'-O-methyluridine-3'-phosphate
  modified_base 22: mod_base = OTHER; note = 2'-O-methylcytidine-3'-phosphate
  modified_base 23: mod_base = OTHER; note = 2'-O-methyladenosine
ttttgtgcagctgttccttatca

SEQ ID NO: 5453 - RNA, 23 nt, synthetic construct
  source 1..23: mol_type = other RNA
  modified_base 1: mod_base = OTHER; note = 2'-O-methyluridine-3'-phosphate 5'phosphate
  modified_base 2: mod_base = OTHER; note = 2'-deoxy-2'-fluorouridine-3'-phosphate
  modified_base 3: mod_base = OTHER; note = 2'-O-methyladenosine-3'-phosphate
  modified_base 4: mod_base = OTHER; note = 2'-O-methylguanosine-3'-phosphate
  modified_base 5: mod_base = OTHER; note = 2'-O-methylcytidine-3'-phosphate
  modified_base 6: mod_base = OTHER; note = 2'-deoxy-2'-fluorouridine-3'-phosphate
  modified_base 7: mod_base = OTHER; note = 2'-O-methylguanosine-3'-phosphate
  modified_base 8: mod_base = OTHER; note = 2'-O-methyladenosine-3'-phosphate
  modified_base 9: mod_base = OTHER; note = 2'-O-methyluridine-3'-phosphate
  modified_base 10: mod_base = OTHER; note = 2'-O-methylguanosine-3'-phosphate
  modified_base 11: mod_base = OTHER; note = 2'-O-methyladenosine-3'-phosphate
  modified_base 12: mod_base = OTHER; note = 2'-O-methylguanosine-3'-phosphate
  modified_base 13: mod_base = OTHER; note = 2'-O-methylguanosine-3'-phosphate
  modified_base 14: mod_base = OTHER; note = 2'-deoxy-2'-fluorouridine-3'-phosphate
  modified_base 15: mod_base = OTHER; note = 2'-O-methyladenosine-3'-phosphate
  modified_base 16: mod_base = OTHER; note = 2'-deoxy-2'-fluoroadenosine-3'-phosphate
  modified_base 17: mod_base = OTHER; note = 2'-O-methyladenosine-3'-phosphate
  modified_base 18: mod_base = OTHER; note = 2'-O-methyluridine-3'-phosphate
  modified_base 19: mod_base = OTHER; note = 2'-O-methylguanosine-3'-phosphate
  modified_base 20: mod_base = OTHER; note = 2'-O-methylcytidine-3'-phosphate
  modified_base 21: mod_base = OTHER; note = 2'-O-methylguanosine-3'-phosphate
  modified_base 22: mod_base = OTHER; note = 2'-O-methyluridine-3'-phosphate
  modified_base 23: mod_base = OTHER; note = 2'-O-methylguanosine
ttagctgatgaggtaaatgcgtg

SEQ ID NO: 5454 - RNA, 23 nt, synthetic construct
  source 1..23: mol_type = other RNA
  modified_base 1: mod_base = OTHER; note = 2'-O-methyluridine-3'-phosphate 5'phosphate
  modified_base 2: mod_base = OTHER; note = 2'-deoxy-2'-fluorouridine-3'-phosphate
  modified_base 3: mod_base = OTHER; note = 2'-O-methyluridine-3'-phosphate
  modified_base 4: mod_base = OTHER; note = 2'-O-methyladenosine-3'-phosphate
  modified_base 5: mod_base = OTHER; note = 2'-O-methylguanosine-3'-phosphate
  modified_base 6: mod_base = OTHER; note = 2'-deoxy-2'-fluorocytidine-3'-phosphate
  modified_base 7: mod_base = OTHER; note = 2'-O-methyluridine-3'-phosphate
  modified_base 8: mod_base = OTHER; note = 2'-O-methylguanosine-3'-phosphate
  modified_base 9: mod_base = OTHER; note = 2'-O-methyladenosine-3'-phosphate
  modified_base 10: mod_base = OTHER; note = 2'-O-methyluridine-3'-phosphate
  modified_base 11: mod_base = OTHER; note = 2'-O-methylguanosine-3'-phosphate
  modified_base 12: mod_base = OTHER; note = 2'-O-methyladenosine-3'-phosphate
  modified_base 13: mod_base = OTHER; note = 2'-O-methylguanosine-3'-phosphate
  modified_base 14: mod_base = OTHER; note = 2'-deoxy-2'-fluoroguanosine-3'-phosphate
  modified_base 15: mod_base = OTHER; note = 2'-O-methyluridine-3'-phosphate
  modified_base 16: mod_base = OTHER; note = 2'-deoxy-2'-fluoroadenosine-3'-phosphate
  modified_base 17: mod_base = OTHER; note = 2'-O-methyladenosine-3'-phosphate
  modified_base 18: mod_base = OTHER; note = 2'-O-methyladenosine-3'-phosphate
  modified_base 19: mod_base = OTHER; note = 2'-O-methyluridine-3'-phosphate
  modified_base 20: mod_base = OTHER; note = 2'-O-methylguanosine-3'-phosphate
  modified_base 21: mod_base = OTHER; note = 2'-O-methylcytidine-3'-phosphate
  modified_base 22: mod_base = OTHER; note = 2'-O-methylguanosine-3'-phosphate
  modified_base 23: mod_base = OTHER; note = 2'-O-methyluridine
tttagctgatgaggtaaatgcgt

SEQ ID NO: 5455 - RNA, 23 nt, synthetic construct
  source 1..23: mol_type = other RNA
  modified_base 1: mod_base = OTHER; note = 2'-O-methyluridine-3'-phosphate 5'phosphate
  modified_base 2: mod_base = OTHER; note = 2'-deoxy-2'-fluoroguanosine-3'-phosphate
  modified_base 3: mod_base = OTHER; note = 2'-O-methyluridine-3'-phosphate
  modified_base 4: mod_base = OTHER; note = 2'-O-methyluridine-3'-phosphate
  modified_base 5: mod_base = OTHER; note = 2'-O-methyladenosine-3'-phosphate
  modified_base 6: mod_base = OTHER; note = 2'-deoxy-2'-fluoroguanosine-3'-phosphate
  modified_base 7: mod_base = OTHER; note = 2'-O-methylcytidine-3'-phosphate
  modified_base 8: mod_base = OTHER; note = 2'-O-methyluridine-3'-phosphate
  modified_base 9: mod_base = OTHER; note = 2'-O-methylguanosine-3'-phosphate
  modified_base 10: mod_base = OTHER; note = 2'-O-methyladenosine-3'-phosphate
  modified_base 11: mod_base = OTHER; note = 2'-O-methyluridine-3'-phosphate
  modified_base 12: mod_base = OTHER; note = 2'-O-methylguanosine-3'-phosphate
  modified_base 13: mod_base = OTHER; note = 2'-O-methyladenosine-3'-phosphate
  modified_base 14: mod_base = OTHER; note = 2'-deoxy-2'-fluoroguanosine-3'-phosphate
  modified_base 15: mod_base = OTHER; note = 2'-O-methylguanosine-3'-phosphate
  modified_base 16: mod_base = OTHER; note = 2'-deoxy-2'-fluorouridine-3'-phosphate
  modified_base 17: mod_base = OTHER; note = 2'-O-methyladenosine-3'-phosphate
  modified_base 18: mod_base = OTHER; note = 2'-O-methyladenosine-3'-phosphate
  modified_base 19: mod_base = OTHER; note = 2'-O-methyladenosine-3'-phosphate
  modified_base 20: mod_base = OTHER; note = 2'-O-methyluridine-3'-phosphate
  modified_base 21: mod_base = OTHER; note = 2'-O-methylguanosine-3'-phosphate
  modified_base 22: mod_base = OTHER; note = 2'-O-methylcytidine-3'-phosphate
  modified_base 23: mod_base = OTHER; note = 2'-O-methylguanosine
tgttagctgatgaggtaaatgcg

SEQ ID NO: 5456 - RNA, 23 nt, synthetic construct
  source 1..23: mol_type = other RNA
  modified_base 1: mod_base = OTHER; note = 2'-O-methyluridine-3'-phosphate 5'phosphate
  modified_base 2: mod_base = OTHER; note = 2'-deoxy-2'-fluoroadenosine-3'-phosphate
  modified_base 3: mod_base = OTHER; note = 2'-O-methylguanosine-3'-phosphate
  modified_base 4: mod_base = OTHER; note = 2'-O-methyluridine-3'-phosphate
  modified_base 5: mod_base = OTHER; note = 2'-O-methyladenosine-3'-phosphate
  modified_base 6: mod_base = OTHER; note = 2'-deoxy-2'-fluoroadenosine-3'-phosphate
  modified_base 7: mod_base = OTHER; note = 2'-O-methyladenosine-3'-phosphate
  modified_base 8: mod_base = OTHER; note = 2'-O-methyladenosine-3'-phosphate
  modified_base 9: mod_base = OTHER; note = 2'-O-methyladenosine-3'-phosphate
  modified_base 10: mod_base = OTHER; note = 2'-O-methyluridine-3'-phosphate
  modified_base 11: mod_base = OTHER; note = 2'-O-methylguanosine-3'-phosphate
  modified_base 12: mod_base = OTHER; note = 2'-O-methylcytidine-3'-phosphate
  modified_base 13: mod_base = OTHER; note = 2'-O-methyladenosine-3'-phosphate
  modified_base 14: mod_base = OTHER; note = 2'-deoxy-2'-fluorouridine-3'-phosphate
  modified_base 15: mod_base = OTHER; note = 2'-O-methylguanosine-3'-phosphate
  modified_base 16: mod_base = OTHER; note = 2'-deoxy-2'-fluorouridine-3'-phosphate
  modified_base 17: mod_base = OTHER; note = 2'-O-methylcytidine-3'-phosphate
  modified_base 18: mod_base = OTHER; note = 2'-O-methyladenosine-3'-phosphate
  modified_base 19: mod_base = OTHER; note = 2'-O-methyladenosine-3'-phosphate
  modified_base 20: mod_base = OTHER; note = 2'-O-methylguanosine-3'-phosphate
  modified_base 21: mod_base = OTHER; note = 2'-O-methylcytidine-3'-phosphate
  modified_base 22: mod_base = OTHER; note = 2'-O-methylcytidine-3'-phosphate
  modified_base 23: mod_base = OTHER; note = 2'-O-methylcytidine
tagtaaaaatgcatgtcaagccc

SEQ ID NO: 5457 - RNA, 23 nt, synthetic construct
  source 1..23: mol_type = other RNA
  modified_base 1: mod_base = OTHER; note = 2'-O-methyluridine-3'-phosphate 5'phosphate
  modified_base 2: mod_base = OTHER; note = 2'-deoxy-2'-fluorocytidine-3'-phosphate
  modified_base 3: mod_base = OTHER; note = 2'-O-methyladenosine-3'-phosphate
  modified_base 4: mod_base = OTHER; note = 2'-O-methylguanosine-3'-phosphate
  modified_base 5: mod_base = OTHER; note = 2'-O-methyluridine-3'-phosphate
  modified_base 6: mod_base = OTHER; note = 2'-deoxy-2'-fluoroadenosine-3'-phosphate
  modified_base 7: mod_base = OTHER; note = 2'-O-methyladenosine-3'-phosphate
  modified_base 8: mod_base = OTHER; note = 2'-O-methyladenosine-3'-phosphate
  modified_base 9: mod_base = OTHER; note = 2'-O-methyladenosine-3'-phosphate
  modified_base 10: mod_base = OTHER; note = 2'-O-methyladenosine-3'-phosphate
  modified_base 11: mod_base = OTHER; note = 2'-O-methyluridine-3'-phosphate
  modified_base 12: mod_base = OTHER; note = 2'-O-methylguanosine-3'-phosphate
  modified_base 13: mod_base = OTHER; note = 2'-O-methylcytidine-3'-phosphate
  modified_base 14: mod_base = OTHER; note = 2'-deoxy-2'-fluoroadenosine-3'-phosphate
  modified_base 15: mod_base = OTHER; note = 2'-O-methyluridine-3'-phosphate
  modified_base 16: mod_base = OTHER; note = 2'-deoxy-2'-fluoroguanosine-3'-phosphate
  modified_base 17: mod_base = OTHER; note = 2'-O-methyluridine-3'-phosphate
  modified_base 18: mod_base = OTHER; note = 2'-O-methylcytidine-3'-phosphate
  modified_base 19: mod_base = OTHER; note = 2'-O-methyladenosine-3'-phosphate
  modified_base 20: mod_base = OTHER; note = 2'-O-methyladenosine-3'-phosphate
  modified_base 21: mod_base = OTHER; note = 2'-O-methylguanosine-3'-phosphate
  modified_base 22: mod_base = OTHER; note = 2'-O-methylcytidine-3'-phosphate
  modified_base 23: mod_base = OTHER; note = 2'-O-methylcytidine
tcagtaaaaatgcatgtcaagcc

SEQ ID NO: 5458 - RNA, 23 nt, synthetic construct
  source 1..23: mol_type = other RNA
  modified_base 1: mod_base = OTHER; note = 2'-O-methyluridine-3'-phosphate 5'phosphate
  modified_base 2: mod_base = OTHER; note = 2'-deoxy-2'-fluoroadenosine-3'-phosphate
  modified_base 3: mod_base = OTHER; note = 2'-O-methylcytidine-3'-phosphate
  modified_base 4: mod_base = OTHER; note = 2'-O-methyladenosine-3'-phosphate
  modified_base 5: mod_base = OTHER; note = 2'-O-methylguanosine-3'-phosphate
  modified_base 6: mod_base = OTHER; note = 2'-deoxy-2'-fluorouridine-3'-phosphate
  modified_base 7: mod_base = OTHER; note = 2'-O-methyladenosine-3'-phosphate
  modified_base 8: mod_base = OTHER; note = 2'-O-methyladenosine-3'-phosphate
  modified_base 9: mod_base = OTHER; note = 2'-O-methyladenosine-3'-phosphate
  modified_base 10: mod_base = OTHER; note = 2'-O-methyladenosine-3'-phosphate
  modified_base 11: mod_base = OTHER; note = 2'-O-methyladenosine-3'-phosphate
  modified_base 12: mod_base = OTHER; note = 2'-O-methyluridine-3'-phosphate
  modified_base 13: mod_base = OTHER; note = 2'-O-methylguanosine-3'-phosphate
  modified_base 14: mod_base = OTHER; note = 2'-deoxy-2'-fluorocytidine-3'-phosphate
  modified_base 15: mod_base = OTHER; note = 2'-O-methyladenosine-3'-phosphate
  modified_base 16: mod_base = OTHER; note = 2'-deoxy-2'-fluorouridine-3'-phosphate
  modified_base 17: mod_base = OTHER; note = 2'-O-methylguanosine-3'-phosphate
  modified_base 18: mod_base = OTHER; note = 2'-O-methyluridine-3'-phosphate
  modified_base 19: mod_base = OTHER; note = 2'-O-methylcytidine-3'-phosphate
  modified_base 20: mod_base = OTHER; note = 2'-O-methyladenosine-3'-phosphate
  modified_base 21: mod_base = OTHER; note = 2'-O-methyladenosine-3'-phosphate
  modified_base 22: mod_base = OTHER; note = 2'-O-methylguanosine-3'-phosphate
  modified_base 23: mod_base = OTHER; note = 2'-O-methylcytidine
tacagtaaaaatgcatgtcaagc

SEQ ID NO: 5459 - RNA, 23 nt, synthetic construct
  source 1..23: mol_type = other RNA
  modified_base 1: mod_base = OTHER; note = 2'-O-methyluridine-3'-phosphate 5'phosphate
  modified_base 2: mod_base = OTHER; note = 2'-deoxy-2'-fluoroguanosine-3'-phosphate
  modified_base 3: mod_base = OTHER; note = 2'-O-methyladenosine-3'-phosphate
  modified_base 4: mod_base = OTHER; note = 2'-O-methylcytidine-3'-phosphate
  modified_base 5: mod_base = OTHER; note = 2'-O-methyladenosine-3'-phosphate
  modified_base 6: mod_base = OTHER; note = 2'-deoxy-2'-fluoroguanosine-3'-phosphate
  modified_base 7: mod_base = OTHER; note = 2'-O-methyluridine-3'-phosphate
  modified_base 8: mod_base = OTHER; note = 2'-O-methyladenosine-3'-phosphate
  modified_base 9: mod_base = OTHER; note = 2'-O-methyladenosine-3'-phosphate
  modified_base 10: mod_base = OTHER; note = 2'-O-methyladenosine-3'-phosphate
  modified_base 11: mod_base = OTHER; note = 2'-O-methyladenosine-3'-phosphate
  modified_base 12: mod_base = OTHER; note = 2'-O-methyladenosine-3'-phosphate
  modified_base 13: mod_base = OTHER; note = 2'-O-methyluridine-3'-phosphate
  modified_base 14: mod_base = OTHER; note = 2'-deoxy-2'-fluoroguanosine-3'-phosphate
  modified_base 15: mod_base = OTHER; note = 2'-O-methylcytidine-3'-phosphate
  modified_base 16: mod_base = OTHER; note = 2'-deoxy-2'-fluoroadenosine-3'-phosphate
  modified_base 17: mod_base = OTHER; note = 2'-O-methyluridine-3'-phosphate
  modified_base 18: mod_base = OTHER; note = 2'-O-methylguanosine-3'-phosphate
  modified_base 19: mod_base = OTHER; note = 2'-O-methyluridine-3'-phosphate
  modified_base 20: mod_base = OTHER; note = 2'-O-methylcytidine-3'-phosphate
  modified_base 21: mod_base = OTHER; note = 2'-O-methyladenosine-3'-phosphate
  modified_base 22: mod_base = OTHER; note = 2'-O-methyladenosine-3'-phosphate
  modified_base 23: mod_base = OTHER; note = 2'-O-methylguanosine
tgacagtaaaaatgcatgtcaag

SEQ ID NO: 5460 - RNA, 23 nt, synthetic construct
  source 1..23: mol_type = other RNA
  modified_base 1: mod_base = OTHER; note = 2'-O-methyluridine-3'-phosphate 5'phosphate
  modified_base 2: mod_base = OTHER; note = 2'-deoxy-2'-fluoroadenosine-3'-phosphate
  modified_base 3: mod_base = OTHER; note = 2'-O-methylguanosine-3'-phosphate
  modified_base 4: mod_base = OTHER; note = 2'-O-methyladenosine-3'-phosphate
  modified_base 5: mod_base = OTHER; note = 2'-O-methylcytidine-3'-phosphate
  modified_base 6: mod_base = OTHER; note = 2'-deoxy-2'-fluoroadenosine-3'-phosphate
  modified_base 7: mod_base = OTHER; note = 2'-O-methylguanosine-3'-phosphate
  modified_base 8: mod_base = OTHER; note = 2'-O-methyluridine-3'-phosphate
  modified_base 9: mod_base = OTHER; note = 2'-O-methyladenosine-3'-phosphate
  modified_base 10: mod_base = OTHER; note = 2'-O-methyladenosine-3'-phosphate
  modified_base 11: mod_base = OTHER; note = 2'-O-methyladenosine-3'-phosphate
  modified_base 12: mod_base = OTHER; note = 2'-O-methyladenosine-3'-phosphate
  modified_base 13: mod_base = OTHER; note = 2'-O-methyladenosine-3'-phosphate
  modified_base 14: mod_base = OTHER; note = 2'-deoxy-2'-fluorouridine-3'-phosphate
  modified_base 15: mod_base = OTHER; note = 2'-O-methylguanosine-3'-phosphate
  modified_base 16: mod_base = OTHER; note = 2'-deoxy-2'-fluorocytidine-3'-phosphate
  modified_base 17: mod_base = OTHER; note = 2'-O-methyladenosine-3'-phosphate
  modified_base 18: mod_base = OTHER; note = 2'-O-methyluridine-3'-phosphate
  modified_base 19: mod_base = OTHER; note = 2'-O-methylguanosine-3'-phosphate
  modified_base 20: mod_base = OTHER; note = 2'-O-methyluridine-3'-phosphate
  modified_base 21: mod_base = OTHER; note = 2'-O-methylcytidine-3'-phosphate
  modified_base 22: mod_base = OTHER; note = 2'-O-methyladenosine-3'-phosphate
  modified_base 23: mod_base = OTHER; note = 2'-O-methyladenosine
tagacagtaaaaatgcatgtcaa

SEQ ID NO: 5461 - RNA, 23 nt, synthetic construct
  source 1..23: mol_type = other RNA
  modified_base 1: mod_base = OTHER; note = 2'-O-methyluridine-3'-phosphate 5'phosphate
  modified_base 2: mod_base = OTHER; note = 2'-deoxy-2'-fluoroadenosine-3'-phosphate
  modified_base 3: mod_base = OTHER; note = 2'-O-methyladenosine-3'-phosphate
  modified_base 4: mod_base = OTHER; note = 2'-O-methylguanosine-3'-phosphate
  modified_base 5: mod_base = OTHER; note = 2'-O-methyladenosine-3'-phosphate
  modified_base 6: mod_base = OTHER; note = 2'-deoxy-2'-fluorocytidine-3'-phosphate
  modified_base 7: mod_base = OTHER; note = 2'-O-methyladenosine-3'-phosphate
  modified_base 8: mod_base = OTHER; note = 2'-O-methylguanosine-3'-phosphate
  modified_base 9: mod_base = OTHER; note = 2'-O-methyluridine-3'-phosphate
  modified_base 10: mod_base = OTHER; note = 2'-O-methyladenosine-3'-phosphate
  modified_base 11: mod_base = OTHER; note = 2'-O-methyladenosine-3'-phosphate
  modified_base 12: mod_base = OTHER; note = 2'-O-methyladenosine-3'-phosphate
  modified_base 13: mod_base = OTHER; note = 2'-O-methyladenosine-3'-phosphate
  modified_base 14: mod_base = OTHER; note = 2'-deoxy-2'-fluoroadenosine-3'-phosphate
  modified_base 15: mod_base = OTHER; note = 2'-O-methyluridine-3'-phosphate
  modified_base 16: mod_base = OTHER; note = 2'-deoxy-2'-fluoroguanosine-3'-phosphate
  modified_base 17: mod_base = OTHER; note = 2'-O-methylcytidine-3'-phosphate
  modified_base 18: mod_base = OTHER; note = 2'-O-methyladenosine-3'-phosphate
  modified_base 19: mod_base = OTHER; note = 2'-O-methyluridine-3'-phosphate
  modified_base 20: mod_base = OTHER; note = 2'-O-methylguanosine-3'-phosphate
  modified_base 21: mod_base = OTHER; note = 2'-O-methyluridine-3'-phosphate
  modified_base 22: mod_base = OTHER; note = 2'-O-methylcytidine-3'-phosphate
  modified_base 23: mod_base = OTHER; note = 2'-O-methyladenosine
taagacagtaaaaatgcatgtca

SEQ ID NO: 5462 - RNA, 23 nt, synthetic construct
  source 1..23: mol_type = other RNA
  modified_base 1: mod_base = OTHER; note = 2'-O-methyluridine-3'-phosphate 5'phosphate
  modified_base 2: mod_base = OTHER; note = 2'-deoxy-2'-fluoroadenosine-3'-phosphate
  modified_base 3: mod_base = OTHER; note = 2'-O-methyladenosine-3'-phosphate
  modified_base 4: mod_base = OTHER; note = 2'-O-methyladenosine-3'-phosphate
  modified_base 5: mod_base = OTHER; note = 2'-O-methylguanosine-3'-phosphate
  modified_base 6: mod_base = OTHER; note = 2'-deoxy-2'-fluoroadenosine-3'-phosphate
  modified_base 7: mod_base = OTHER; note = 2'-O-methylcytidine-3'-phosphate
  modified_base 8: mod_base = OTHER; note = 2'-O-methyladenosine-3'-phosphate
  modified_base 9: mod_base = OTHER; note = 2'-O-methylguanosine-3'-phosphate
  modified_base 10: mod_base = OTHER; note = 2'-O-methyluridine-3'-phosphate
  modified_base 11: mod_base = OTHER; note = 2'-O-methyladenosine-3'-phosphate
  modified_base 12: mod_base = OTHER; note = 2'-O-methyladenosine-3'-phosphate
  modified_base 13: mod_base = OTHER; note = 2'-O-methyladenosine-3'-phosphate
  modified_base 14: mod_base = OTHER; note = 2'-deoxy-2'-fluoroadenosine-3'-phosphate
  modified_base 15: mod_base = OTHER; note = 2'-O-methyladenosine-3'-phosphate
  modified_base 16: mod_base = OTHER; note = 2'-deoxy-2'-fluorouridine-3'-phosphate
  modified_base 17: mod_base = OTHER; note = 2'-O-methylguanosine-3'-phosphate
  modified_base 18: mod_base = OTHER; note = 2'-O-methylcytidine-3'-phosphate
  modified_base 19: mod_base = OTHER; note = 2'-O-methyladenosine-3'-phosphate
  modified_base 20: mod_base = OTHER; note = 2'-O-methyluridine-3'-phosphate
  modified_base 21: mod_base = OTHER; note = 2'-O-methylguanosine-3'-phosphate
  modified_base 22: mod_base = OTHER; note = 2'-O-methyluridine-3'-phosphate
  modified_base 23: mod_base = OTHER; note = 2'-O-methylcytidine
taaagacagtaaaaatgcatgtc

SEQ ID NO: 5463 - RNA, 23 nt, synthetic construct
  source 1..23: mol_type = other RNA
  modified_base 1: mod_base = OTHER; note = 2'-O-methyluridine-3'-phosphate 5'phosphate
  modified_base 2: mod_base = OTHER; note = 2'-deoxy-2'-fluorouridine-3'-phosphate
  modified_base 3: mod_base = OTHER; note = 2'-O-methyladenosine-3'-phosphate
  modified_base 4: mod_base = OTHER; note = 2'-O-methyladenosine-3'-phosphate
  modified_base 5: mod_base = OTHER; note = 2'-O-methyladenosine-3'-phosphate
  modified_base 6: mod_base = OTHER; note = 2'-deoxy-2'-fluoroguanosine-3'-phosphate
  modified_base 7: mod_base = OTHER; note = 2'-O-methyladenosine-3'-phosphate
  modified_base 8: mod_base = OTHER; note = 2'-O-methylcytidine-3'-phosphate
  modified_base 9: mod_base = OTHER; note = 2'-O-methyladenosine-3'-phosphate
  modified_base 10: mod_base = OTHER; note = 2'-O-methylguanosine-3'-phosphate
  modified_base 11: mod_base = OTHER; note = 2'-O-methyluridine-3'-phosphate
  modified_base 12: mod_base = OTHER; note = 2'-O-methyladenosine-3'-phosphate
  modified_base 13: mod_base = OTHER; note = 2'-O-methyladenosine-3'-phosphate
  modified_base 14: mod_base = OTHER; note = 2'-deoxy-2'-fluoroadenosine-3'-phosphate
  modified_base 15: mod_base = OTHER; note = 2'-O-methyladenosine-3'-phosphate
  modified_base 16: mod_base = OTHER; note = 2'-deoxy-2'-fluoroadenosine-3'-phosphate
  modified_base 17: mod_base = OTHER; note = 2'-O-methyluridine-3'-phosphate
  modified_base 18: mod_base = OTHER; note = 2'-O-methylguanosine-3'-phosphate
  modified_base 19: mod_base = OTHER; note = 2'-O-methylcytidine-3'-phosphate
  modified_base 20: mod_base = OTHER; note = 2'-O-methyladenosine-3'-phosphate
  modified_base 21: mod_base = OTHER; note = 2'-O-methyluridine-3'-phosphate
  modified_base 22: mod_base = OTHER; note = 2'-O-methylguanosine-3'-phosphate
  modified_base 23: mod_base = OTHER; note = 2'-O-methyluridine
ttaaagacagtaaaaatgcatgt

SEQ ID NO: 5464 - RNA, 23 nt, synthetic construct
  source 1..23: mol_type = other RNA
  modified_base 1: mod_base = OTHER; note = 2'-O-methyluridine-3'-phosphate 5'phosphate
  modified_base 2: mod_base = OTHER; note = 2'-deoxy-2'-fluoroadenosine-3'-phosphate
  modified_base 3: mod_base = OTHER; note = 2'-O-methyluridine-3'-phosphate
  modified_base 4: mod_base = OTHER; note = 2'-O-methyladenosine-3'-phosphate
  modified_base 5: mod_base = OTHER; note = 2'-O-methyladenosine-3'-phosphate
  modified_base 6: mod_base = OTHER; note = 2'-deoxy-2'-fluoroadenosine-3'-phosphate
  modified_base 7: mod_base = OTHER; note = 2'-O-methylguanosine-3'-phosphate
  modified_base 8: mod_base = OTHER; note = 2'-O-methyladenosine-3'-phosphate
  modified_base 9: mod_base = OTHER; note = 2'-O-methylcytidine-3'-phosphate
  modified_base 10: mod_base = OTHER; note = 2'-O-methyladenosine-3'-phosphate
  modified_base 11: mod_base = OTHER; note = 2'-O-methylguanosine-3'-phosphate
  modified_base 12: mod_base = OTHER; note = 2'-O-methyluridine-3'-phosphate
  modified_base 13: mod_base = OTHER; note = 2'-O-methyladenosine-3'-phosphate
  modified_base 14: mod_base = OTHER; note = 2'-deoxy-2'-fluoroadenosine-3'-phosphate
  modified_base 15: mod_base = OTHER; note = 2'-O-methyladenosine-3'-phosphate
  modified_base 16: mod_base = OTHER; note = 2'-deoxy-2'-fluoroadenosine-3'-phosphate
  modified_base 17: mod_base = OTHER; note = 2'-O-methyladenosine-3'-phosphate
  modified_base 18: mod_base = OTHER; note = 2'-O-methyluridine-3'-phosphate
  modified_base 19: mod_base = OTHER; note = 2'-O-methylguanosine-3'-phosphate
  modified_base 20: mod_base = OTHER; note = 2'-O-methylcytidine-3'-phosphate
  modified_base 21: mod_base = OTHER; note = 2'-O-methyladenosine-3'-phosphate
  modified_base 22: mod_base = OTHER; note = 2'-O-methyluridine-3'-phosphate
  modified_base 23: mod_base = OTHER; note = 2'-O-methylguanosine
tataaagacagtaaaaatgcatg

SEQ ID NO: 5465 - RNA, 23 nt, synthetic construct
  source 1..23: mol_type = other RNA
  modified_base 1: mod_base = OTHER; note = 2'-O-methyluridine-3'-phosphate 5'phosphate
  modified_base 2: mod_base = OTHER; note = 2'-deoxy-2'-fluoroadenosine-3'-phosphate
  modified_base 3: mod_base = OTHER; note = 2'-O-methyladenosine-3'-phosphate
  modified_base 4: mod_base = OTHER; note = 2'-O-methyluridine-3'-phosphate
  modified_base 5: mod_base = OTHER; note = 2'-O-methyladenosine-3'-phosphate
  modified_base 6: mod_base = OTHER; note = 2'-deoxy-2'-fluoroadenosine-3'-phosphate
  modified_base 7: mod_base = OTHER; note = 2'-O-methyladenosine-3'-phosphate
  modified_base 8: mod_base = OTHER; note = 2'-O-methylguanosine-3'-phosphate
  modified_base 9: mod_base = OTHER; note = 2'-O-methyladenosine-3'-phosphate
  modified_base 10: mod_base = OTHER; note = 2'-O-methylcytidine-3'-phosphate
  modified_base 11: mod_base = OTHER; note = 2'-O-methyladenosine-3'-phosphate
  modified_base 12: mod_base = OTHER; note = 2'-O-methylguanosine-3'-phosphate
  modified_base 13: mod_base = OTHER; note = 2'-O-methyluridine-3'-phosphate
  modified_base 14: mod_base = OTHER; note = 2'-deoxy-2'-fluoroadenosine-3'-phosphate
  modified_base 15: mod_base = OTHER; note = 2'-O-methyladenosine-3'-phosphate
  modified_base 16: mod_base = OTHER; note = 2'-deoxy-2'-fluoroadenosine-3'-phosphate
  modified_base 17: mod_base = OTHER; note = 2'-O-methyladenosine-3'-phosphate
  modified_base 18: mod_base = OTHER; note = 2'-O-methyladenosine-3'-phosphate
  modified_base 19: mod_base = OTHER; note = 2'-O-methyluridine-3'-phosphate
  modified_base 20: mod_base = OTHER; note = 2'-O-methylguanosine-3'-phosphate
  modified_base 21: mod_base = OTHER; note = 2'-O-methylcytidine-3'-phosphate
  modified_base 22: mod_base = OTHER; note = 2'-O-methyladenosine-3'-phosphate
  modified_base 23: mod_base = OTHER; note = 2'-O-methyluridine
taataaagacagtaaaaatgcat

SEQ ID NO: 5466 - RNA, 23 nt, synthetic construct
  source 1..23: mol_type = other RNA
  modified_base 1: mod_base = OTHER; note = 2'-O-methyluridine-3'-phosphate 5'phosphate
  modified_base 2: mod_base = OTHER; note = 2'-deoxy-2'-fluoroguanosine-3'-phosphate
  modified_base 3: mod_base = OTHER; note = 2'-O-methyladenosine-3'-phosphate
  modified_base 4: mod_base = OTHER; note = 2'-O-methyladenosine-3'-phosphate
  modified_base 5: mod_base = OTHER; note = 2'-O-methyluridine-3'-phosphate
  modified_base 6: mod_base = OTHER; note = 2'-deoxy-2'-fluoroadenosine-3'-phosphate
  modified_base 7: mod_base = OTHER; note = 2'-O-methyladenosine-3'-phosphate
  modified_base 8: mod_base = OTHER; note = 2'-O-methyladenosine-3'-phosphate
  modified_base 9: mod_base = OTHER; note = 2'-O-methylguanosine-3'-phosphate
  modified_base 10: mod_base = OTHER; note = 2'-O-methyladenosine-3'-phosphate
  modified_base 11: mod_base = OTHER; note = 2'-O-methylcytidine-3'-phosphate
  modified_base 12: mod_base = OTHER; note = 2'-O-methyladenosine-3'-phosphate
  modified_base 13: mod_base = OTHER; note = 2'-O-methylguanosine-3'-phosphate
  modified_base 14: mod_base = OTHER; note = 2'-deoxy-2'-fluorouridine-3'-phosphate
  modified_base 15: mod_base = OTHER; note = 2'-O-methyladenosine-3'-phosphate
  modified_base 16: mod_base = OTHER; note = 2'-deoxy-2'-fluoroadenosine-3'-phosphate
  modified_base 17: mod_base = OTHER; note = 2'-O-methyladenosine-3'-phosphate
  modified_base 18: mod_base = OTHER; note = 2'-O-methyladenosine-3'-phosphate
  modified_base 19: mod_base = OTHER; note = 2'-O-methyladenosine-3'-phosphate
  modified_base 20: mod_base = OTHER; note = 2'-O-methyluridine-3'-phosphate
  modified_base 21: mod_base = OTHER; note = 2'-O-methylguanosine-3'-phosphate
  modified_base 22: mod_base = OTHER; note = 2'-O-methylcytidine-3'-phosphate
  modified_base 23: mod_base = OTHER; note = 2'-O-methyladenosine
tgaataaagacagtaaaaatgca

SEQ ID NO: 5467 - RNA, 23 nt, synthetic construct
  source 1..23: mol_type = other RNA
  modified_base 1: mod_base = OTHER; note = 2'-O-methyluridine-3'-phosphate 5'phosphate
  modified_base 2: mod_base = OTHER; note = 2'-deoxy-2'-fluoroguanosine-3'-phosphate
  modified_base 3: mod_base = OTHER; note = 2'-O-methylguanosine-3'-phosphate
  modified_base 4: mod_base = OTHER; note = 2'-O-methyladenosine-3'-phosphate
  modified_base 5: mod_base = OTHER; note = 2'-O-methyladenosine-3'-phosphate
  modified_base 6: mod_base = OTHER; note = 2'-deoxy-2'-fluorouridine-3'-phosphate
  modified_base 7: mod_base = OTHER; note = 2'-O-methyladenosine-3'-phosphate
  modified_base 8: mod_base = OTHER; note = 2'-O-methyladenosine-3'-phosphate
  modified_base 9: mod_base = OTHER; note = 2'-O-methyladenosine-3'-phosphate
  modified_base 10: mod_base = OTHER; note = 2'-O-methylguanosine-3'-phosphate
  modified_base 11: mod_base = OTHER; note = 2'-O-methyladenosine-3'-phosphate
  modified_base 12: mod_base = OTHER; note = 2'-O-methylcytidine-3'-phosphate
  modified_base 13: mod_base = OTHER; note = 2'-O-methyladenosine-3'-phosphate
  modified_base 14: mod_base = OTHER; note = 2'-deoxy-2'-fluoroguanosine-3'-phosphate
  modified_base 15: mod_base = OTHER; note = 2'-O-methyluridine-3'-phosphate
  modified_base 16: mod_base = OTHER; note = 2'-deoxy-2'-fluoroadenosine-3'-phosphate
  modified_base 17: mod_base = OTHER; note = 2'-O-methyladenosine-3'-phosphate
  modified_base 18: mod_base = OTHER; note = 2'-O-methyladenosine-3'-phosphate
  modified_base 19: mod_base = OTHER; note = 2'-O-methyladenosine-3'-phosphate
  modified_base 20: mod_base = OTHER; note = 2'-O-methyladenosine-3'-phosphate
  modified_base 21: mod_base = OTHER; note = 2'-O-methyluridine-3'-phosphate
  modified_base 22: mod_base = OTHER; note = 2'-O-methylguanosine-3'-phosphate
  modified_base 23: mod_base = OTHER; note = 2'-O-methylcytidine
tggaataaagacagtaaaaatgc

SEQ ID NO: 5468 - RNA, 23 nt, synthetic construct
  source 1..23: mol_type = other RNA
  modified_base 1: mod_base = OTHER; note = 2'-O-methyluridine-3'-phosphate 5'phosphate
  modified_base 2: mod_base = OTHER; note = 2'-deoxy-2'-fluoroadenosine-3'-phosphate
  modified_base 3: mod_base = OTHER; note = 2'-O-methylguanosine-3'-phosphate
  modified_base 4: mod_base = OTHER; note = 2'-O-methylguanosine-3'-phosphate
  modified_base 5: mod_base = OTHER; note = 2'-O-methyladenosine-3'-phosphate
  modified_base 6: mod_base = OTHER; note = 2'-deoxy-2'-fluoroadenosine-3'-phosphate
  modified_base 7: mod_base = OTHER; note = 2'-O-methyluridine-3'-phosphate
  modified_base 8: mod_base = OTHER; note = 2'-O-methyladenosine-3'-phosphate
  modified_base 9: mod_base = OTHER; note = 2'-O-methyladenosine-3'-phosphate
  modified_base 10: mod_base = OTHER; note = 2'-O-methyladenosine-3'-phosphate
  modified_base 11: mod_base = OTHER; note = 2'-O-methylguanosine-3'-phosphate
  modified_base 12: mod_base = OTHER; note = 2'-O-methyladenosine-3'-phosphate
  modified_base 13: mod_base = OTHER; note = 2'-O-methylcytidine-3'-phosphate
  modified_base 14: mod_base = OTHER; note = 2'-deoxy-2'-fluoroadenosine-3'-phosphate
  modified_base 15: mod_base = OTHER; note = 2'-O-methylguanosine-3'-phosphate
  modified_base 16: mod_base = OTHER; note = 2'-deoxy-2'-fluorouridine-3'-phosphate
  modified_base 17: mod_base = OTHER; note = 2'-O-methyladenosine-3'-phosphate
  modified_base 18: mod_base = OTHER; note = 2'-O-methyladenosine-3'-phosphate
  modified_base 19: mod_base = OTHER; note = 2'-O-methyladenosine-3'-phosphate
  modified_base 20: mod_base = OTHER; note = 2'-O-methyladenosine-3'-phosphate
  modified_base 21: mod_base = OTHER; note = 2'-O-methyladenosine-3'-phosphate
  modified_base 22: mod_base = OTHER; note = 2'-O-methyluridine-3'-phosphate
  modified_base 23: mod_base = OTHER; note = 2'-O-methylguanosine
taggaataaagacagtaaaaatg

SEQ ID NO: 5469 - RNA, 23 nt, synthetic construct
  source 1..23: mol_type = other RNA
  modified_base 1: mod_base = OTHER; note = 2'-O-methyluridine-3'-phosphate 5'phosphate
  modified_base 2: mod_base = OTHER; note = 2'-deoxy-2'-fluorocytidine-3'-phosphate
  modified_base 3: mod_base = OTHER; note = 2'-O-methyladenosine-3'-phosphate
  modified_base 4: mod_base = OTHER; note = 2'-O-methylguanosine-3'-phosphate
  modified_base 5: mod_base = OTHER; note = 2'-O-methylguanosine-3'-phosphate
  modified_base 6: mod_base = OTHER; note = 2'-deoxy-2'-fluoroadenosine-3'-phosphate
  modified_base 7: mod_base = OTHER; note = 2'-O-methyladenosine-3'-phosphate
  modified_base 8: mod_base = OTHER; note = 2'-O-methyluridine-3'-phosphate
  modified_base 9: mod_base = OTHER; note = 2'-O-methyladenosine-3'-phosphate
  modified_base 10: mod_base = OTHER; note = 2'-O-methyladenosine-3'-phosphate
  modified_base 11: mod_base = OTHER; note = 2'-O-methyladenosine-3'-phosphate
  modified_base 12: mod_base = OTHER; note = 2'-O-methylguanosine-3'-phosphate
  modified_base 13: mod_base = OTHER; note = 2'-O-methyladenosine-3'-phosphate
  modified_base 14: mod_base = OTHER; note = 2'-deoxy-2'-fluorocytidine-3'-phosphate
  modified_base 15: mod_base = OTHER; note = 2'-O-methyladenosine-3'-phosphate
  modified_base 16: mod_base = OTHER; note = 2'-deoxy-2'-fluoroguanosine-3'-phosphate
  modified_base 17: mod_base = OTHER; note = 2'-O-methyluridine-3'-phosphate
  modified_base 18: mod_base = OTHER; note = 2'-O-methyladenosine-3'-phosphate
  modified_base 19: mod_base = OTHER; note = 2'-O-methyladenosine-3'-phosphate
  modified_base 20: mod_base = OTHER; note = 2'-O-methyladenosine-3'-phosphate
  modified_base 21: mod_base = OTHER; note = 2'-O-methyladenosine-3'-phosphate
  modified_base 22: mod_base = OTHER; note = 2'-O-methyladenosine-3'-phosphate
  modified_base 23: mod_base = OTHER; note = 2'-O-methyluridine
tcaggaataaagacagtaaaaat

SEQ ID NO: 5470 - RNA, 23 nt, synthetic construct
  source 1..23: mol_type = other RNA
  modified_base 1: mod_base = OTHER; note = 2'-O-methyluridine-3'-phosphate 5'phosphate
  modified_base 2: mod_base = OTHER; note = 2'-deoxy-2'-fluorouridine-3'-phosphate
  modified_base 3: mod_base = OTHER; note = 2'-O-methylcytidine-3'-phosphate
  modified_base 4: mod_base = OTHER; note = 2'-O-methyladenosine-3'-phosphate
  modified_base 5: mod_base = OTHER; note = 2'-O-methylguanosine-3'-phosphate
  modified_base 6: mod_base = OTHER; note = 2'-deoxy-2'-fluoroguanosine-3'-phosphate
  modified_base 7: mod_base = OTHER; note = 2'-O-methyladenosine-3'-phosphate
  modified_base 8: mod_base = OTHER; note = 2'-O-methyladenosine-3'-phosphate
  modified_base 9: mod_base = OTHER; note = 2'-O-methyluridine-3'-phosphate
  modified_base 10: mod_base = OTHER; note = 2'-O-methyladenosine-3'-phosphate
  modified_base 11: mod_base = OTHER; note = 2'-O-methyladenosine-3'-phosphate
  modified_base 12: mod_base = OTHER; note = 2'-O-methyladenosine-3'-phosphate
  modified_base 13: mod_base = OTHER; note = 2'-O-methylguanosine-3'-phosphate
  modified_base 14: mod_base = OTHER; note = 2'-deoxy-2'-fluoroadenosine-3'-phosphate
  modified_base 15: mod_base = OTHER; note = 2'-O-methylcytidine-3'-phosphate
  modified_base 16: mod_base = OTHER; note = 2'-deoxy-2'-fluoroadenosine-3'-phosphate
  modified_base 17: mod_base = OTHER; note = 2'-O-methylguanosine-3'-phosphate
  modified_base 18: mod_base = OTHER; note = 2'-O-methyluridine-3'-phosphate
  modified_base 19: mod_base = OTHER; note = 2'-O-methyladenosine-3'-phosphate
  modified_base 20: mod_base = OTHER; note = 2'-O-methyladenosine-3'-phosphate
  modified_base 21: mod_base = OTHER; note = 2'-O-methyladenosine-3'-phosphate
  modified_base 22: mod_base = OTHER; note = 2'-O-methyladenosine-3'-phosphate
  modified_base 23: mod_base = OTHER; note = 2'-O-methyladenosine
ttcaggaataaagacagtaaaaa

SEQ ID NO: 5471 - RNA, 23 nt, synthetic construct
  source 1..23: mol_type = other RNA
  modified_base 1: mod_base = OTHER; note = 2'-O-methyluridine-3'-phosphate 5'phosphate
  modified_base 2: mod_base = OTHER; note = 2'-deoxy-2'-fluorouridine-3'-phosphate
  modified_base 3: mod_base = OTHER; note = 2'-O-methylguanosine-3'-phosphate
  modified_base 4: mod_base = OTHER; note = 2'-O-methyluridine-3'-phosphate
  modified_base 5: mod_base = OTHER; note = 2'-O-methylcytidine-3'-phosphate
  modified_base 6: mod_base = OTHER; note = 2'-deoxy-2'-fluoroadenosine-3'-phosphate
  modified_base 7: mod_base = OTHER; note = 2'-O-methylguanosine-3'-phosphate
  modified_base 8: mod_base = OTHER; note = 2'-O-methylguanosine-3'-phosphate
  modified_base 9: mod_base = OTHER; note = 2'-O-methyladenosine-3'-phosphate
  modified_base 10: mod_base = OTHER; note = 2'-O-methyladenosine-3'-phosphate
  modified_base 11: mod_base = OTHER; note = 2'-O-methyluridine-3'-phosphate
  modified_base 12: mod_base = OTHER; note = 2'-O-methyladenosine-3'-phosphate
  modified_base 13: mod_base = OTHER; note = 2'-O-methyladenosine-3'-phosphate
  modified_base 14: mod_base = OTHER; note = 2'-deoxy-2'-fluoroadenosine-3'-phosphate
  modified_base 15: mod_base = OTHER; note = 2'-O-methylguanosine-3'-phosphate
  modified_base 16: mod_base = OTHER; note = 2'-deoxy-2'-fluoroadenosine-3'-phosphate
  modified_base 17: mod_base = OTHER; note = 2'-O-methylcytidine-3'-phosphate
  modified_base 18: mod_base = OTHER; note = 2'-O-methyladenosine-3'-phosphate
  modified_base 19: mod_base = OTHER; note = 2'-O-methylguanosine-3'-phosphate
  modified_base 20: mod_base = OTHER; note = 2'-O-methyluridine-3'-phosphate
  modified_base 21: mod_base = OTHER; note = 2'-O-methyladenosine-3'-phosphate
  modified_base 22: mod_base = OTHER; note = 2'-O-methyladenosine-3'-phosphate
  modified_base 23: mod_base = OTHER; note = 2'-O-methyladenosine
ttgtcaggaataaagacagtaaa

SEQ ID NO: 5472 - RNA, 23 nt, synthetic construct
  source 1..23: mol_type = other RNA
  modified_base 1: mod_base = OTHER; note = 2'-O-methyluridine-3'-phosphate 5'phosphate
  modified_base 2: mod_base = OTHER; note = 2'-deoxy-2'-fluoroguanosine-3'-phosphate
  modified_base 3: mod_base = OTHER; note = 2'-O-methyluridine-3'-phosphate
  modified_base 4: mod_base = OTHER; note = 2'-O-methylguanosine-3'-phosphate
  modified_base 5: mod_base = OTHER; note = 2'-O-methyluridine-3'-phosphate
  modified_base 6: mod_base = OTHER; note = 2'-deoxy-2'-fluorocytidine-3'-phosphate
  modified_base 7: mod_base = OTHER; note = 2'-O-methyladenosine-3'-phosphate
  modified_base 8: mod_base = OTHER; note = 2'-O-methylguanosine-3'-phosphate
  modified_base 9: mod_base = OTHER; note = 2'-O-methylguanosine-3'-phosphate
  modified_base 10: mod_base = OTHER; note = 2'-O-methyladenosine-3'-phosphate
  modified_base 11: mod_base = OTHER; note = 2'-O-methyladenosine-3'-phosphate
  modified_base 12: mod_base = OTHER; note = 2'-O-methyluridine-3'-phosphate
  modified_base 13: mod_base = OTHER; note = 2'-O-methyladenosine-3'-phosphate
  modified_base 14: mod_base = OTHER; note = 2'-deoxy-2'-fluoroadenosine-3'-phosphate
  modified_base 15: mod_base = OTHER; note = 2'-O-methyladenosine-3'-phosphate
  modified_base 16: mod_base = OTHER; note = 2'-deoxy-2'-fluoroguanosine-3'-phosphate
  modified_base 17: mod_base = OTHER; note = 2'-O-methyladenosine-3'-phosphate
  modified_base 18: mod_base = OTHER; note = 2'-O-methylcytidine-3'-phosphate
  modified_base 19: mod_base = OTHER; note = 2'-O-methyladenosine-3'-phosphate
  modified_base 20: mod_base = OTHER; note = 2'-O-methylguanosine-3'-phosphate
  modified_base 21: mod_base = OTHER; note = 2'-O-methyluridine-3'-phosphate
  modified_base 22: mod_base = OTHER; note = 2'-O-methyladenosine-3'-phosphate
  modified_base 23: mod_base = OTHER; note = 2'-O-methyladenosine
tgtgtcaggaataaagacagtaa

SEQ ID NO: 5473 - RNA, 23 nt, synthetic construct
  source 1..23: mol_type = other RNA
  modified_base 1: mod_base = OTHER; note = 2'-O-methyluridine-3'-phosphate 5'phosphate
  modified_base 2: mod_base = OTHER; note = 2'-deoxy-2'-fluoroadenosine-3'-phosphate
  modified_base 3: mod_base = OTHER; note = 2'-O-methylguanosine-3'-phosphate
  modified_base 4: mod_base = OTHER; note = 2'-O-methyluridine-3'-phosphate
  modified_base 5: mod_base = OTHER; note = 2'-O-methylguanosine-3'-phosphate
  modified_base 6: mod_base = OTHER; note = 2'-deoxy-2'-fluorouridine-3'-phosphate
  modified_base 7: mod_base = OTHER; note = 2'-O-methylcytidine-3'-phosphate
  modified_base 8: mod_base = OTHER; note = 2'-O-methyladenosine-3'-phosphate
  modified_base 9: mod_base = OTHER; note = 2'-O-methylguanosine-3'-phosphate
  modified_base 10: mod_base = OTHER; note = 2'-O-methylguanosine-3'-phosphate
  modified_base 11: mod_base = OTHER; note = 2'-O-methyladenosine-3'-phosphate
  modified_base 12: mod_base = OTHER; note = 2'-O-methyladenosine-3'-phosphate
  modified_base 13: mod_base = OTHER; note = 2'-O-methyluridine-3'-phosphate
  modified_base 14: mod_base = OTHER; note = 2'-deoxy-2'-fluoroadenosine-3'-phosphate
  modified_base 15: mod_base = OTHER; note = 2'-O-methyladenosine-3'-phosphate
  modified_base 16: mod_base = OTHER; note = 2'-deoxy-2'-fluoroadenosine-3'-phosphate
  modified_base 17: mod_base = OTHER; note = 2'-O-methylguanosine-3'-phosphate
  modified_base 18: mod_base = OTHER; note = 2'-O-methyladenosine-3'-phosphate
  modified_base 19: mod_base = OTHER; note = 2'-O-methylcytidine-3'-phosphate
  modified_base 20: mod_base = OTHER; note = 2'-O-methyladenosine-3'-phosphate
  modified_base 21: mod_base = OTHER; note = 2'-O-methylguanosine-3'-phosphate
  modified_base 22: mod_base = OTHER; note = 2'-O-methyluridine-3'-phosphate
  modified_base 23: mod_base = OTHER; note = 2'-O-methyladenosine
tagtgtcaggaataaagacagta

SEQ ID NO: 5474 - RNA, 23 nt, synthetic construct
  source 1..23: mol_type = other RNA
  modified_base 1: mod_base = OTHER; note = 2'-O-methyluridine-3'-phosphate 5'phosphate
  modified_base 2: mod_base = OTHER; note = 2'-deoxy-2'-fluorouridine-3'-phosphate
  modified_base 3: mod_base = OTHER; note = 2'-O-methylcytidine-3'-phosphate
  modified_base 4: mod_base = OTHER; note = 2'-O-methyladenosine-3'-phosphate
  modified_base 5: mod_base = OTHER; note = 2'-O-methylguanosine-3'-phosphate
  modified_base 6: mod_base = OTHER; note = 2'-deoxy-2'-fluorouridine-3'-phosphate
  modified_base 7: mod_base = OTHER; note = 2'-O-methylguanosine-3'-phosphate
  modified_base 8: mod_base = OTHER; note = 2'-O-methyluridine-3'-phosphate
  modified_base 9: mod_base = OTHER; note = 2'-O-methylcytidine-3'-phosphate
  modified_base 10: mod_base = OTHER; note = 2'-O-methyladenosine-3'-phosphate
  modified_base 11: mod_base = OTHER; note = 2'-O-methylguanosine-3'-phosphate
  modified_base 12: mod_base = OTHER; note = 2'-O-methylguanosine-3'-phosphate
  modified_base 13: mod_base = OTHER; note = 2'-O-methyladenosine-3'-phosphate
  modified_base 14: mod_base = OTHER; note = 2'-deoxy-2'-fluoroadenosine-3'-phosphate
  modified_base 15: mod_base = OTHER; note = 2'-O-methyluridine-3'-phosphate
  modified_base 16: mod_base = OTHER; note = 2'-deoxy-2'-fluoroadenosine-3'-phosphate
  modified_base 17: mod_base = OTHER; note = 2'-O-methyladenosine-3'-phosphate
  modified_base 18: mod_base = OTHER; note = 2'-O-methyladenosine-3'-phosphate
  modified_base 19: mod_base = OTHER; note = 2'-O-methylguanosine-3'-phosphate
  modified_base 20: mod_base = OTHER; note = 2'-O-methyladenosine-3'-phosphate
  modified_base 21: mod_base = OTHER; note = 2'-O-methylcytidine-3'-phosphate
  modified_base 22: mod_base = OTHER; note = 2'-O-methyladenosine-3'-phosphate
  modified_base 23: mod_base = OTHER; note = 2'-O-methylguanosine
ttcagtgtcaggaataaagacag

SEQ ID NO: 5475 - RNA, 23 nt, synthetic construct
  source 1..23: mol_type = other RNA
  modified_base 1: mod_base = OTHER; note = 2'-O-methyluridine-3'-phosphate 5'phosphate
  modified_base 2: mod_base = OTHER; note = 2'-deoxy-2'-fluoroadenosine-3'-phosphate
  modified_base 3: mod_base = OTHER; note = 2'-O-methyladenosine-3'-phosphate
  modified_base 4: mod_base = OTHER; note = 2'-O-methyladenosine-3'-phosphate
  modified_base 5: mod_base = OTHER; note = 2'-O-methyladenosine-3'-phosphate
  modified_base 6: mod_base = OTHER; note = 2'-deoxy-2'-fluorocytidine-3'-phosphate
  modified_base 7: mod_base = OTHER; note = 2'-O-methyladenosine-3'-phosphate
  modified_base 8: mod_base = OTHER; note = 2'-O-methyluridine-3'-phosphate
  modified_base 9: mod_base = OTHER; note = 2'-O-methyluridine-3'-phosphate
  modified_base 10: mod_base = OTHER; note = 2'-O-methylcytidine-3'-phosphate
  modified_base 11: mod_base = OTHER; note = 2'-O-methyladenosine-3'-phosphate
  modified_base 12: mod_base = OTHER; note = 2'-O-methyluridine-3'-phosphate
  modified_base 13: mod_base = OTHER; note = 2'-O-methylcytidine-3'-phosphate
  modified_base 14: mod_base = OTHER; note = 2'-deoxy-2'-fluorouridine-3'-phosphate
  modified_base 15: mod_base = OTHER; note = 2'-O-methylcytidine-3'-phosphate
  modified_base 16: mod_base = OTHER; note = 2'-deoxy-2'-fluoroadenosine-3'-phosphate
  modified_base 17: mod_base = OTHER; note = 2'-O-methylguanosine-3'-phosphate
  modified_base 18: mod_base = OTHER; note = 2'-O-methyluridine-3'-phosphate
  modified_base 19: mod_base = OTHER; note = 2'-O-methylguanosine-3'-phosphate
  modified_base 20: mod_base = OTHER; note = 2'-O-methyluridine-3'-phosphate
  modified_base 21: mod_base = OTHER; note = 2'-O-methylcytidine-3'-phosphate
  modified_base 22: mod_base = OTHER; note = 2'-O-methyladenosine-3'-phosphate
  modified_base 23: mod_base = OTHER; note = 2'-O-methylguanosine
taaaacattcatctcagtgtcag

SEQ ID NO: 5476 - RNA, 23 nt, synthetic construct
  source 1..23: mol_type = other RNA
  modified_base 1: mod_base = OTHER; note = 2'-O-methyluridine-3'-phosphate 5'phosphate
  modified_base 2: mod_base = OTHER; note = 2'-deoxy-2'-fluoroguanosine-3'-phosphate
  modified_base 3: mod_base = OTHER; note = 2'-O-methyladenosine-3'-phosphate
  modified_base 4: mod_base = OTHER; note = 2'-O-methyladenosine-3'-phosphate
  modified_base 5: mod_base = OTHER; note = 2'-O-methyladenosine-3'-phosphate
  modified_base 6: mod_base = OTHER; note = 2'-deoxy-2'-fluoroadenosine-3'-phosphate
  modified_base 7: mod_base = OTHER; note = 2'-O-methylcytidine-3'-phosphate
  modified_base 8: mod_base = OTHER; note = 2'-O-methyladenosine-3'-phosphate
  modified_base 9: mod_base = OTHER; note = 2'-O-methyluridine-3'-phosphate
  modified_base 10: mod_base = OTHER; note = 2'-O-methyluridine-3'-phosphate
  modified_base 11: mod_base = OTHER; note = 2'-O-methylcytidine-3'-phosphate
  modified_base 12: mod_base = OTHER; note = 2'-O-methyladenosine-3'-phosphate
  modified_base 13: mod_base = OTHER; note = 2'-O-methyluridine-3'-phosphate
  modified_base 14: mod_base = OTHER; note = 2'-deoxy-2'-fluorocytidine-3'-phosphate
  modified_base 15: mod_base = OTHER; note = 2'-O-methyluridine-3'-phosphate
  modified_base 16: mod_base = OTHER; note = 2'-deoxy-2'-fluorocytidine-3'-phosphate
  modified_base 17: mod_base = OTHER; note = 2'-O-methyladenosine-3'-phosphate
  modified_base 18: mod_base = OTHER; note = 2'-O-methylguanosine-3'-phosphate
  modified_base 19: mod_base = OTHER; note = 2'-O-methyluridine-3'-phosphate
  modified_base 20: mod_base = OTHER; note = 2'-O-methylguanosine-3'-phosphate
  modified_base 21: mod_base = OTHER; note = 2'-O-methyluridine-3'-phosphate
  modified_base 22: mod_base = OTHER; note = 2'-O-methylcytidine-3'-phosphate
  modified_base 23: mod_base = OTHER; note = 2'-O-methyladenosine
tgaaaacattcatctcagtgtca

SEQ ID NO: 5477 - RNA, 23 nt, synthetic construct
  source 1..23: mol_type = other RNA
  modified_base 1: mod_base = OTHER; note = 2'-O-methyluridine-3'-phosphate 5'phosphate
  modified_base 2: mod_base = OTHER; note = 2'-deoxy-2'-fluorouridine-3'-phosphate
  modified_base 3: mod_base = OTHER; note = 2'-O-methylguanosine-3'-phosphate
  modified_base 4: mod_base = OTHER; note = 2'-O-methyladenosine-3'-phosphate
  modified_base 5: mod_base = OTHER; note = 2'-O-methyladenosine-3'-phosphate
  modified_base 6: mod_base = OTHER; note = 2'-deoxy-2'-fluoroadenosine-3'-phosphate
  modified_base 7: mod_base = OTHER; note = 2'-O-methyladenosine-3'-phosphate
  modified_base 8: mod_base = OTHER; note = 2'-O-methylcytidine-3'-phosphate
  modified_base 9: mod_base = OTHER; note = 2'-O-methyladenosine-3'-phosphate
  modified_base 10: mod_base = OTHER; note = 2'-O-methyluridine-3'-phosphate
  modified_base 11: mod_base = OTHER; note = 2'-O-methyluridine-3'-phosphate
  modified_base 12: mod_base = OTHER; note = 2'-O-methylcytidine-3'-phosphate
  modified_base 13: mod_base = OTHER; note = 2'-O-methyladenosine-3'-phosphate
  modified_base 14: mod_base = OTHER; note = 2'-deoxy-2'-fluorouridine-3'-phosphate
  modified_base 15: mod_base = OTHER; note = 2'-O-methylcytidine-3'-phosphate
  modified_base 16: mod_base = OTHER; note = 2'-deoxy-2'-fluorouridine-3'-phosphate
  modified_base 17: mod_base = OTHER; note = 2'-O-methylcytidine-3'-phosphate
  modified_base 18: mod_base = OTHER; note = 2'-O-methyladenosine-3'-phosphate
  modified_base 19: mod_base = OTHER; note = 2'-O-methylguanosine-3'-phosphate
  modified_base 20: mod_base = OTHER; note = 2'-O-methyluridine-3'-phosphate
  modified_base 21: mod_base = OTHER; note = 2'-O-methylguanosine-3'-phosphate
  modified_base 22: mod_base = OTHER; note = 2'-O-methyluridine-3'-phosphate
  modified_base 23: mod_base = OTHER; note = 2'-O-methylcytidine
ttgaaaacattcatctcagtgtc

SEQ ID NO: 5478 - RNA, 23 nt, synthetic construct
  source 1..23: mol_type = other RNA
  modified_base 1: mod_base = OTHER; note = 2'-O-methyluridine-3'-phosphate 5'phosphate
  modified_base 2: mod_base = OTHER; note = 2'-deoxy-2'-fluorouridine-3'-phosphate
  modified_base 3: mod_base = OTHER; note = 2'-O-methyluridine-3'-phosphate
  modified_base 4: mod_base = OTHER; note = 2'-O-methylguanosine-3'-phosphate
  modified_base 5: mod_base = OTHER; note = 2'-O-methyladenosine-3'-phosphate
  modified_base 6: mod_base = OTHER; note = 2'-deoxy-2'-fluoroadenosine-3'-phosphate
  modified_base 7: mod_base = OTHER; note = 2'-O-methyladenosine-3'-phosphate
  modified_base 8: mod_base = OTHER; note = 2'-O-methyladenosine-3'-phosphate
  modified_base 9: mod_base = OTHER; note = 2'-O-methylcytidine-3'-phosphate
  modified_base 10: mod_base = OTHER; note = 2'-O-methyladenosine-3'-phosphate
  modified_base 11: mod_base = OTHER; note = 2'-O-methyluridine-3'-phosphate
  modified_base 12: mod_base = OTHER; note = 2'-O-methyluridine-3'-phosphate
  modified_base 13: mod_base = OTHER; note = 2'-O-methylcytidine-3'-phosphate
  modified_base 14: mod_base = OTHER; note = 2'-deoxy-2'-fluoroadenosine-3'-phosphate
  modified_base 15: mod_base = OTHER; note = 2'-O-methyluridine-3'-phosphate
  modified_base 16: mod_base = OTHER; note = 2'-deoxy-2'-fluorocytidine-3'-phosphate
  modified_base 17: mod_base = OTHER; note = 2'-O-methyluridine-3'-phosphate
  modified_base 18: mod_base = OTHER; note = 2'-O-methylcytidine-3'-phosphate
  modified_base 19: mod_base = OTHER; note = 2'-O-methyladenosine-3'-phosphate
  modified_base 20: mod_base = OTHER; note = 2'-O-methylguanosine-3'-phosphate
  modified_base 21: mod_base = OTHER; note = 2'-O-methyluridine-3'-phosphate
  modified_base 22: mod_base = OTHER; note = 2'-O-methylguanosine-3'-phosphate
  modified_base 23: mod_base = OTHER; note = 2'-O-methyluridine
tttgaaaacattcatctcagtgt

SEQ ID NO: 5479 - RNA, 23 nt, synthetic construct
  source 1..23: mol_type = other RNA
  modified_base 1: mod_base = OTHER; note = 2'-O-methyluridine-3'-phosphate 5'phosphate
  modified_base 2: mod_base = OTHER; note = 2'-deoxy-2'-fluorouridine-3'-phosphate
  modified_base 3: mod_base = OTHER; note = 2'-O-methyluridine-3'-phosphate
  modified_base 4: mod_base = OTHER; note = 2'-O-methyluridine-3'-phosphate
  modified_base 5: mod_base = OTHER; note = 2'-O-methylguanosine-3'-phosphate
  modified_base 6: mod_base = OTHER; note = 2'-deoxy-2'-fluoroadenosine-3'-phosphate
  modified_base 7: mod_base = OTHER; note = 2'-O-methyladenosine-3'-phosphate
  modified_base 8: mod_base = OTHER; note = 2'-O-methyladenosine-3'-phosphate
  modified_base 9: mod_base = OTHER; note = 2'-O-methyladenosine-3'-phosphate
  modified_base 10: mod_base = OTHER; note = 2'-O-methylcytidine-3'-phosphate
  modified_base 11: mod_base = OTHER; note = 2'-O-methyladenosine-3'-phosphate
  modified_base 12: mod_base = OTHER; note = 2'-O-methyluridine-3'-phosphate
  modified_base 13: mod_base = OTHER; note = 2'-O-methyluridine-3'-phosphate
  modified_base 14: mod_base = OTHER; note = 2'-deoxy-2'-fluorocytidine-3'-phosphate
  modified_base 15: mod_base = OTHER; note = 2'-O-methyladenosine-3'-phosphate
  modified_base 16: mod_base = OTHER; note = 2'-deoxy-2'-fluorouridine-3'-phosphate
  modified_base 17: mod_base = OTHER; note = 2'-O-methylcytidine-3'-phosphate
  modified_base 18: mod_base = OTHER; note = 2'-O-methyluridine-3'-phosphate
  modified_base 19: mod_base = OTHER; note = 2'-O-methylcytidine-3'-phosphate
  modified_base 20: mod_base = OTHER; note = 2'-O-methyladenosine-3'-phosphate
  modified_base 21: mod_base = OTHER; note = 2'-O-methylguanosine-3'-phosphate
  modified_base 22: mod_base = OTHER; note = 2'-O-methyluridine-3'-phosphate
  modified_base 23: mod_base = OTHER; note = 2'-O-methylguanosine
ttttgaaaacattcatctcagtg

SEQ ID NO: 5480 - RNA, 23 nt, synthetic construct
  source 1..23: mol_type = other RNA
  modified_base 1: mod_base = OTHER; note = 2'-O-methyluridine-3'-phosphate 5'phosphate
  modified_base 2: mod_base = OTHER; note = 2'-deoxy-2'-fluorocytidine-3'-phosphate
  modified_base 3: mod_base = OTHER; note = 2'-O-methyluridine-3'-phosphate
  modified_base 4: mod_base = OTHER; note = 2'-O-methyluridine-3'-phosphate
  modified_base 5: mod_base = OTHER; note = 2'-O-methyluridine-3'-phosphate
  modified_base 6: mod_base = OTHER; note = 2'-deoxy-2'-fluoroguanosine-3'-phosphate
  modified_base 7: mod_base = OTHER; note = 2'-O-methyladenosine-3'-phosphate
  modified_base 8: mod_base = OTHER; note = 2'-O-methyladenosine-3'-phosphate
  modified_base 9: mod_base = OTHER; note = 2'-O-methyladenosine-3'-phosphate
  modified_base 10: mod_base = OTHER; note = 2'-O-methyladenosine-3'-phosphate
  modified_base 11: mod_base = OTHER; note = 2'-O-methylcytidine-3'-phosphate
  modified_base 12: mod_base = OTHER; note = 2'-O-methyladenosine-3'-phosphate
  modified_base 13: mod_base = OTHER; note = 2'-O-methyluridine-3'-phosphate
  modified_base 14: mod_base = OTHER; note = 2'-deoxy-2'-fluorouridine-3'-phosphate
  modified_base 15: mod_base = OTHER; note = 2'-O-methylcytidine-3'-phosphate
  modified_base 16: mod_base = OTHER; note = 2'-deoxy-2'-fluoroadenosine-3'-phosphate
  modified_base 17: mod_base = OTHER; note = 2'-O-methyluridine-3'-phosphate
  modified_base 18: mod_base = OTHER; note = 2'-O-methylcytidine-3'-phosphate
  modified_base 19: mod_base = OTHER; note = 2'-O-methyluridine-3'-phosphate
  modified_base 20: mod_base = OTHER; note = 2'-O-methylcytidine-3'-phosphate
  modified_base 21: mod_base = OTHER; note = 2'-O-methyladenosine-3'-phosphate
  modified_base 22: mod_base = OTHER; note = 2'-O-methylguanosine-3'-phosphate
  modified_base 23: mod_base = OTHER; note = 2'-O-methyluridine
tctttgaaaacattcatctcagt

SEQ ID NO: 5481 - RNA, 23 nt, synthetic construct
  source 1..23: mol_type = other RNA
  modified_base 1: mod_base = OTHER; note = 2'-O-methyluridine-3'-phosphate 5'phosphate
  modified_base 2: mod_base = OTHER; note = 2'-deoxy-2'-fluoroguanosine-3'-phosphate
  modified_base 3: mod_base = OTHER; note = 2'-O-methylcytidine-3'-phosphate
  modified_base 4: mod_base = OTHER; note = 2'-O-methyluridine-3'-phosphate
  modified_base 5: mod_base = OTHER; note = 2'-O-methyluridine-3'-phosphate
  modified_base 6: mod_base = OTHER; note = 2'-deoxy-2'-fluorouridine-3'-phosphate
  modified_base 7: mod_base = OTHER; note = 2'-O-methylguanosine-3'-phosphate
  modified_base 8: mod_base = OTHER; note = 2'-O-methyladenosine-3'-phosphate
  modified_base 9: mod_base = OTHER; note = 2'-O-methyladenosine-3'-phosphate
  modified_base 10: mod_base = OTHER; note = 2'-O-methyladenosine-3'-phosphate
  modified_base 11: mod_base = OTHER; note = 2'-O-methyladenosine-3'-phosphate
  modified_base 12: mod_base = OTHER; note = 2'-O-methylcytidine-3'-phosphate
  modified_base 13: mod_base = OTHER; note = 2'-O-methyladenosine-3'-phosphate
  modified_base 14: mod_base = OTHER; note = 2'-deoxy-2'-fluorouridine-3'-phosphate
  modified_base 15: mod_base = OTHER; note = 2'-O-methyluridine-3'-phosphate
  modified_base 16: mod_base = OTHER; note = 2'-deoxy-2'-fluorocytidine-3'-phosphate
  modified_base 17: mod_base = OTHER; note = 2'-O-methyladenosine-3'-phosphate
  modified_base 18: mod_base = OTHER; note = 2'-O-methyluridine-3'-phosphate
  modified_base 19: mod_base = OTHER; note = 2'-O-methylcytidine-3'-phosphate
  modified_base 20: mod_base = OTHER; note = 2'-O-methyluridine-3'-phosphate
  modified_base 21: mod_base = OTHER; note = 2'-O-methylcytidine-3'-phosphate
  modified_base 22: mod_base = OTHER; note = 2'-O-methyladenosine-3'-phosphate
  modified_base 23: mod_base = OTHER; note = 2'-O-methylguanosine
tgctttgaaaacattcatctcag

SEQ ID NO: 5482 - RNA, 23 nt, synthetic construct
  source 1..23: mol_type = other RNA
  modified_base 1: mod_base = OTHER; note = 2'-O-methyluridine-3'-phosphate 5'phosphate
  modified_base 2: mod_base = OTHER; note = 2'-deoxy-2'-fluoroadenosine-3'-phosphate
  modified_base 3: mod_base = OTHER; note = 2'-O-methylguanosine-3'-phosphate
  modified_base 4: mod_base = OTHER; note = 2'-O-methylcytidine-3'-phosphate
  modified_base 5: mod_base = OTHER; note = 2'-O-methyluridine-3'-phosphate
  modified_base 6: mod_base = OTHER; note = 2'-deoxy-2'-fluorouridine-3'-phosphate
  modified_base 7: mod_base = OTHER; note = 2'-O-methyluridine-3'-phosphate
  modified_base 8: mod_base = OTHER; note = 2'-O-methylguanosine-3'-phosphate
  modified_base 9: mod_base = OTHER; note = 2'-O-methyladenosine-3'-phosphate
  modified_base 10: mod_base = OTHER; note = 2'-O-methyladenosine-3'-phosphate
  modified_base 11: mod_base = OTHER; note = 2'-O-methyladenosine-3'-phosphate
  modified_base 12: mod_base = OTHER; note = 2'-O-methyladenosine-3'-phosphate
  modified_base 13: mod_base = OTHER; note = 2'-O-methylcytidine-3'-phosphate
  modified_base 14: mod_base = OTHER; note = 2'-deoxy-2'-fluoroadenosine-3'-phosphate
  modified_base 15: mod_base = OTHER; note = 2'-O-methyluridine-3'-phosphate
  modified_base 16: mod_base = OTHER; note = 2'-deoxy-2'-fluorouridine-3'-phosphate
  modified_base 17: mod_base = OTHER; note = 2'-O-methylcytidine-3'-phosphate
  modified_base 18: mod_base = OTHER; note = 2'-O-methyladenosine-3'-phosphate
  modified_base 19: mod_base = OTHER; note = 2'-O-methyluridine-3'-phosphate
  modified_base 20: mod_base = OTHER; note = 2'-O-methylcytidine-3'-phosphate
  modified_base 21: mod_base = OTHER; note = 2'-O-methyluridine-3'-phosphate
  modified_base 22: mod_base = OTHER; note = 2'-O-methylcytidine-3'-phosphate
  modified_base 23: mod_base = OTHER; note = 2'-O-methyladenosine
tagctttgaaaacattcatctca

SEQ ID NO: 5483 - RNA, 23 nt, synthetic construct
  source 1..23: mol_type = other RNA
  modified_base 1: mod_base = OTHER; note = 2'-O-methyluridine-3'-phosphate 5'phosphate
  modified_base 2: mod_base = OTHER; note = 2'-deoxy-2'-fluoroguanosine-3'-phosphate
  modified_base 3: mod_base = OTHER; note = 2'-O-methyluridine-3'-phosphate
  modified_base 4: mod_base = OTHER; note = 2'-O-methyluridine-3'-phosphate
  modified_base 5: mod_base = OTHER; note = 2'-O-methylguanosine-3'-phosphate
  modified_base 6: mod_base = OTHER; note = 2'-deoxy-2'-fluorocytidine-3'-phosphate
  modified_base 7: mod_base = OTHER; note = 2'-O-methyladenosine-3'-phosphate
  modified_base 8: mod_base = OTHER; note = 2'-O-methylguanosine-3'-phosphate
  modified_base 9: mod_base = OTHER; note = 2'-O-methylcytidine-3'-phosphate
  modified_base 10: mod_base = OTHER; note = 2'-O-methyluridine-3'-phosphate
  modified_base 11: mod_base = OTHER; note = 2'-O-methyluridine-3'-phosphate
  modified_base 12: mod_base = OTHER; note = 2'-O-methyluridine-3'-phosphate
  modified_base 13: mod_base = OTHER; note = 2'-O-methylguanosine-3'-phosphate
  modified_base 14: mod_base = OTHER; note = 2'-deoxy-2'-fluoroadenosine-3'-phosphate
  modified_base 15: mod_base = OTHER; note = 2'-O-methyladenosine-3'-phosphate
  modified_base 16: mod_base = OTHER; note = 2'-deoxy-2'-fluoroadenosine-3'-phosphate
  modified_base 17: mod_base = OTHER; note = 2'-O-methyladenosine-3'-phosphate
  modified_base 18: mod_base = OTHER; note = 2'-O-methylcytidine-3'-phosphate
  modified_base 19: mod_base = OTHER; note = 2'-O-methyladenosine-3'-phosphate
  modified_base 20: mod_base = OTHER; note = 2'-O-methyluridine-3'-phosphate
  modified_base 21: mod_base = OTHER; note = 2'-O-methyluridine-3'-phosphate
  modified_base 22: mod_base = OTHER; note = 2'-O-methylcytidine-3'-phosphate
  modified_base 23: mod_base = OTHER; note = 2'-O-methyladenosine
tgttgcagctttgaaaacattca

SEQ ID NO: 5484 - RNA, 23 nt, synthetic construct
  source 1..23: mol_type = other RNA
  modified_base 1: mod_base = OTHER; note = 2'-O-methyluridine-3'-phosphate 5'phosphate
  modified_base 2: mod_base = OTHER; note = 2'-deoxy-2'-fluorouridine-3'-phosphate
  modified_base 3: mod_base = OTHER; note = 2'-O-methylguanosine-3'-phosphate
  modified_base 4: mod_base = OTHER; note = 2'-O-methyluridine-3'-phosphate
  modified_base 5: mod_base = OTHER; note = 2'-O-methyluridine-3'-phosphate
  modified_base 6: mod_base = OTHER; note = 2'-deoxy-2'-fluoroguanosine-3'-phosphate
  modified_base 7: mod_base = OTHER; note = 2'-O-methylcytidine-3'-phosphate
  modified_base 8: mod_base = OTHER; note = 2'-O-methyladenosine-3'-phosphate
  modified_base 9: mod_base = OTHER; note = 2'-O-methylguanosine-3'-phosphate
  modified_base 10: mod_base = OTHER; note = 2'-O-methylcytidine-3'-phosphate
  modified_base 11: mod_base = OTHER; note = 2'-O-methyluridine-3'-phosphate
  modified_base 12: mod_base = OTHER; note = 2'-O-methyluridine-3'-phosphate
  modified_base 13: mod_base = OTHER; note = 2'-O-methyluridine-3'-phosphate
  modified_base 14: mod_base = OTHER; note = 2'-deoxy-2'-fluoroguanosine-3'-phosphate
  modified_base 15: mod_base = OTHER; note = 2'-O-methyladenosine-3'-phosphate
  modified_base 16: mod_base = OTHER; note = 2'-deoxy-2'-fluoroadenosine-3'-phosphate
  modified_base 17: mod_base = OTHER; note = 2'-O-methyladenosine-3'-phosphate
  modified_base 18: mod_base = OTHER; note = 2'-O-methyladenosine-3'-phosphate
  modified_base 19: mod_base = OTHER; note = 2'-O-methylcytidine-3'-phosphate
  modified_base 20: mod_base = OTHER; note = 2'-O-methyladenosine-3'-phosphate
  modified_base 21: mod_base = OTHER; note = 2'-O-methyluridine-3'-phosphate
  modified_base 22: mod_base = OTHER; note = 2'-O-methyluridine-3'-phosphate
  modified_base 23: mod_base = OTHER; note = 2'-O-methylcytidine
ttgttgcagctttgaaaacattc

SEQ ID NO: 5485 - RNA, 23 nt, synthetic construct
  source 1..23: mol_type = other RNA
  modified_base 1: mod_base = OTHER; note = 2'-O-methyluridine-3'-phosphate 5'phosphate
  modified_base 2: mod_base = OTHER; note = 2'-deoxy-2'-fluoroadenosine-3'-phosphate
  modified_base 3: mod_base = OTHER; note = 2'-O-methyluridine-3'-phosphate
  modified_base 4: mod_base = OTHER; note = 2'-O-methylguanosine-3'-phosphate
  modified_base 5: mod_base = OTHER; note = 2'-O-methyluridine-3'-phosphate
  modified_base 6: mod_base = OTHER; note = 2'-deoxy-2'-fluorouridine-3'-phosphate
  modified_base 7: mod_base = OTHER; note = 2'-O-methylguanosine-3'-phosphate
  modified_base 8: mod_base = OTHER; note = 2'-O-methylcytidine-3'-phosphate
  modified_base 9: mod_base = OTHER; note = 2'-O-methyladenosine-3'-phosphate
  modified_base 10: mod_base = OTHER; note = 2'-O-methylguanosine-3'-phosphate
  modified_base 11: mod_base = OTHER; note = 2'-O-methylcytidine-3'-phosphate
  modified_base 12: mod_base = OTHER; note = 2'-O-methyluridine-3'-phosphate
  modified_base 13: mod_base = OTHER; note = 2'-O-methyluridine-3'-phosphate
  modified_base 14: mod_base = OTHER; note = 2'-deoxy-2'-fluorouridine-3'-phosphate
  modified_base 15: mod_base = OTHER; note = 2'-O-methylguanosine-3'-phosphate
  modified_base 16: mod_base = OTHER; note = 2'-deoxy-2'-fluoroadenosine-3'-phosphate
  modified_base 17: mod_base = OTHER; note = 2'-O-methyladenosine-3'-phosphate
  modified_base 18: mod_base = OTHER; note = 2'-O-methyladenosine-3'-phosphate
  modified_base 19: mod_base = OTHER; note = 2'-O-methyladenosine-3'-phosphate
  modified_base 20: mod_base = OTHER; note = 2'-O-methylcytidine-3'-phosphate
  modified_base 21: mod_base = OTHER; note = 2'-O-methyladenosine-3'-phosphate
  modified_base 22: mod_base = OTHER; note = 2'-O-methyluridine-3'-phosphate
  modified_base 23: mod_base = OTHER; note = 2'-O-methyluridine
tatgttgcagctttgaaaacatt

SEQ ID NO: 5486 - RNA, 23 nt, synthetic construct
  source 1..23: mol_type = other RNA
  modified_base 1: mod_base = OTHER; note = 2'-O-methyluridine-3'-phosphate 5'phosphate
  modified_base 2: mod_base = OTHER; note = 2'-deoxy-2'-fluorocytidine-3'-phosphate
  modified_base 3: mod_base = OTHER; note = 2'-O-methyladenosine-3'-phosphate
  modified_base 4: mod_base = OTHER; note = 2'-O-methyluridine-3'-phosphate
  modified_base 5: mod_base = OTHER; note = 2'-O-methylguanosine-3'-phosphate
  modified_base 6: mod_base = OTHER; note = 2'-deoxy-2'-fluorouridine-3'-phosphate
  modified_base 7: mod_base = OTHER; note = 2'-O-methyluridine-3'-phosphate
  modified_base 8: mod_base = OTHER; note = 2'-O-methylguanosine-3'-phosphate
  modified_base 9: mod_base = OTHER; note = 2'-O-methylcytidine-3'-phosphate
  modified_base 10: mod_base = OTHER; note = 2'-O-methyladenosine-3'-phosphate
  modified_base 11: mod_base = OTHER; note = 2'-O-methylguanosine-3'-phosphate
  modified_base 12: mod_base = OTHER; note = 2'-O-methylcytidine-3'-phosphate
  modified_base 13: mod_base = OTHER; note = 2'-O-methyluridine-3'-phosphate
  modified_base 14: mod_base = OTHER; note = 2'-deoxy-2'-fluorouridine-3'-phosphate
  modified_base 15: mod_base = OTHER; note = 2'-O-methyluridine-3'-phosphate
  modified_base 16: mod_base = OTHER; note = 2'-deoxy-2'-fluoroguanosine-3'-phosphate
  modified_base 17: mod_base = OTHER; note = 2'-O-methyladenosine-3'-phosphate
  modified_base 18: mod_base = OTHER; note = 2'-O-methyladenosine-3'-phosphate
  modified_base 19: mod_base = OTHER; note = 2'-O-methyladenosine-3'-phosphate
  modified_base 20: mod_base = OTHER; note = 2'-O-methyladenosine-3'-phosphate
  modified_base 21: mod_base = OTHER; note = 2'-O-methylcytidine-3'-phosphate
  modified_base 22: mod_base = OTHER; note = 2'-O-methyladenosine-3'-phosphate
  modified_base 23: mod_base = OTHER; note = 2'-O-methyluridine
tcatgttgcagctttgaaaacat

SEQ ID NO: 5487 - RNA, 23 nt, synthetic construct
  source 1..23: mol_type = other RNA
  modified_base 1: mod_base = OTHER; note = 2'-O-methyluridine-3'-phosphate 5'phosphate
  modified_base 2: mod_base = OTHER; note = 2'-deoxy-2'-fluorouridine-3'-phosphate
  modified_base 3: mod_base = OTHER; note = 2'-O-methylcytidine-3'-phosphate
  modified_base 4: mod_base = OTHER; note = 2'-O-methylcytidine-3'-phosphate
  modified_base 5: mod_base = OTHER; note = 2'-O-methylcytidine-3'-phosphate
  modified_base 6: mod_base = OTHER; note = 2'-deoxy-2'-fluoroadenosine-3'-phosphate
  modified_base 7: mod_base = OTHER; note = 2'-O-methyladenosine-3'-phosphate
  modified_base 8: mod_base = OTHER; note = 2'-O-methyluridine-3'-phosphate
  modified_base 9: mod_base = OTHER; note = 2'-O-methyladenosine-3'-phosphate
  modified_base 10: mod_base = OTHER; note = 2'-O-methyladenosine-3'-phosphate
  modified_base 11: mod_base = OTHER; note = 2'-O-methylcytidine-3'-phosphate
  modified_base 12: mod_base = OTHER; note = 2'-O-methyladenosine-3'-phosphate
  modified_base 13: mod_base = OTHER; note = 2'-O-methylguanosine-3'-phosphate
  modified_base 14: mod_base = OTHER; note = 2'-deoxy-2'-fluoroadenosine-3'-phosphate
  modified_base 15: mod_base = OTHER; note = 2'-O-methyladenosine-3'-phosphate
  modified_base 16: mod_base = OTHER; note = 2'-deoxy-2'-fluorouridine-3'-phosphate
  modified_base 17: mod_base = OTHER; note = 2'-O-methylcytidine-3'-phosphate
  modified_base 18: mod_base = OTHER; note = 2'-O-methylguanosine-3'-phosphate
  modified_base 19: mod_base = OTHER; note = 2'-O-methylguanosine-3'-phosphate
  modified_base 20: mod_base = OTHER; note = 2'-O-methyluridine-3'-phosphate
  modified_base 21: mod_base = OTHER; note = 2'-O-methyluridine-3'-phosphate
  modified_base 22: mod_base = OTHER; note = 2'-O-methyluridine-3'-phosphate
  modified_base 23: mod_base = OTHER; note = 2'-O-methylguanosine
ttcccaataacagaatcggtttg

SEQ ID NO: 5488 - RNA, 23 nt, synthetic construct
  source 1..23: mol_type = other RNA
  modified_base 1: mod_base = OTHER; note = 2'-O-methyluridine-3'-phosphate 5'phosphate
  modified_base 2: mod_base = OTHER; note = 2'-deoxy-2'-fluorouridine-3'-phosphate
  modified_base 3: mod_base = OTHER; note = 2'-O-methyluridine-3'-phosphate
  modified_base 4: mod_base = OTHER; note = 2'-O-methylcytidine-3'-phosphate
  modified_base 5: mod_base = OTHER; note = 2'-O-methylcytidine-3'-phosphate
  modified_base 6: mod_base = OTHER; note = 2'-deoxy-2'-fluorocytidine-3'-phosphate
  modified_base 7: mod_base = OTHER; note = 2'-O-methyladenosine-3'-phosphate
  modified_base 8: mod_base = OTHER; note = 2'-O-methyladenosine-3'-phosphate
  modified_base 9: mod_base = OTHER; note = 2'-O-methyluridine-3'-phosphate
  modified_base 10: mod_base = OTHER; note = 2'-O-methyladenosine-3'-phosphate
  modified_base 11: mod_base = OTHER; note = 2'-O-methyladenosine-3'-phosphate
  modified_base 12: mod_base = OTHER; note = 2'-O-methylcytidine-3'-phosphate
  modified_base 13: mod_base = OTHER; note = 2'-O-methyladenosine-3'-phosphate
  modified_base 14: mod_base = OTHER; note = 2'-deoxy-2'-fluoroguanosine-3'-phosphate
  modified_base 15: mod_base = OTHER; note = 2'-O-methyladenosine-3'-phosphate
  modified_base 16: mod_base = OTHER; note = 2'-deoxy-2'-fluoroadenosine-3'-phosphate
  modified_base 17: mod_base = OTHER; note = 2'-O-methyluridine-3'-phosphate
  modified_base 18: mod_base = OTHER; note = 2'-O-methylcytidine-3'-phosphate
  modified_base 19: mod_base = OTHER; note = 2'-O-methylguanosine-3'-phosphate
  modified_base 20: mod_base = OTHER; note = 2'-O-methylguanosine-3'-phosphate
  modified_base 21: mod_base = OTHER; note = 2'-O-methyluridine-3'-phosphate
  modified_base 22: mod_base = OTHER; note = 2'-O-methyluridine-3'-phosphate
  modified_base 23: mod_base = OTHER; note = 2'-O-methyluridine
tttcccaataacagaatcggttt

SEQ ID NO: 5489 - RNA, 23 nt, synthetic construct
  source 1..23: mol_type = other RNA
  modified_base 1: mod_base = OTHER; note = 2'-O-methyluridine-3'-phosphate 5'phosphate
  modified_base 2: mod_base = OTHER; note = 2'-deoxy-2'-fluoroadenosine-3'-phosphate
  modified_base 3: mod_base = OTHER; note = 2'-O-methyluridine-3'-phosphate
  modified_base 4: mod_base = OTHER; note = 2'-O-methyluridine-3'-phosphate
  modified_base 5: mod_base = OTHER; note = 2'-O-methylcytidine-3'-phosphate
  modified_base 6: mod_base = OTHER; note = 2'-deoxy-2'-fluorocytidine-3'-phosphate
  modified_base 7: mod_base = OTHER; note = 2'-O-methylcytidine-3'-phosphate
  modified_base 8: mod_base = OTHER; note = 2'-O-methyladenosine-3'-phosphate
  modified_base 9: mod_base = OTHER; note = 2'-O-methyladenosine-3'-phosphate
  modified_base 10: mod_base = OTHER; note = 2'-O-methyluridine-3'-phosphate
  modified_base 11: mod_base = OTHER; note = 2'-O-methyladenosine-3'-phosphate
  modified_base 12: mod_base = OTHER; note = 2'-O-methyladenosine-3'-phosphate
  modified_base 13: mod_base = OTHER; note = 2'-O-methylcytidine-3'-phosphate
  modified_base 14: mod_base = OTHER; note = 2'-deoxy-2'-fluoroadenosine-3'-phosphate
  modified_base 15: mod_base = OTHER; note = 2'-O-methylguanosine-3'-phosphate
  modified_base 16: mod_base = OTHER; note = 2'-deoxy-2'-fluoroadenosine-3'-phosphate
  modified_base 17: mod_base = OTHER; note = 2'-O-methyladenosine-3'-phosphate
  modified_base 18: mod_base = OTHER; note = 2'-O-methyluridine-3'-phosphate
  modified_base 19: mod_base = OTHER; note = 2'-O-methylcytidine-3'-phosphate
  modified_base 20: mod_base = OTHER; note = 2'-O-methylguanosine-3'-phosphate
  modified_base 21: mod_base = OTHER; note = 2'-O-methylguanosine-3'-phosphate
  modified_base 22: mod_base = OTHER; note = 2'-O-methyluridine-3'-phosphate
  modified_base 23: mod_base = OTHER; note = 2'-O-methyluridine
tattcccaataacagaatcggtt

SEQ ID NO: 5490 - RNA, 23 nt, synthetic construct
  source 1..23: mol_type = other RNA
  modified_base 1: mod_base = OTHER; note = 2'-O-methyluridine-3'-phosphate 5'phosphate
  modified_base 2: mod_base = OTHER; note = 2'-deoxy-2'-fluorocytidine-3'-phosphate
  modified_base 3: mod_base = OTHER; note = 2'-O-methyladenosine-3'-phosphate
  modified_base 4: mod_base = OTHER; note = 2'-O-methyluridine-3'-phosphate
  modified_base 5: mod_base = OTHER; note = 2'-O-methyluridine-3'-phosphate
  modified_base 6: mod_base = OTHER; note = 2'-deoxy-2'-fluorocytidine-3'-phosphate
  modified_base 7: mod_base = OTHER; note = 2'-O-methylcytidine-3'-phosphate
  modified_base 8: mod_base = OTHER; note = 2'-O-methylcytidine-3'-phosphate
  modified_base 9: mod_base = OTHER; note = 2'-O-methyladenosine-3'-phosphate
  modified_base 10: mod_base = OTHER; note = 2'-O-methyladenosine-3'-phosphate
  modified_base 11: mod_base = OTHER; note = 2'-O-methyluridine-3'-phosphate
  modified_base 12: mod_base = OTHER; note = 2'-O-methyladenosine-3'-phosphate
  modified_base 13: mod_base = OTHER; note = 2'-O-methyladenosine-3'-phosphate
  modified_base 14: mod_base = OTHER; note = 2'-deoxy-2'-fluorocytidine-3'-phosphate
  modified_base 15: mod_base = OTHER; note = 2'-O-methyladenosine-3'-phosphate
  modified_base 16: mod_base = OTHER; note = 2'-deoxy-2'-fluoroguanosine-3'-phosphate
  modified_base 17: mod_base = OTHER; note = 2'-O-methyladenosine-3'-phosphate
  modified_base 18: mod_base = OTHER; note = 2'-O-methyladenosine-3'-phosphate
  modified_base 19: mod_base = OTHER; note = 2'-O-methyluridine-3'-phosphate
  modified_base 20: mod_base = OTHER; note = 2'-O-methylcytidine-3'-phosphate
  modified_base 21: mod_base = OTHER; note = 2'-O-methylguanosine-3'-phosphate
  modified_base 22: mod_base = OTHER; note = 2'-O-methylguanosine-3'-phosphate
  modified_base 23: mod_base = OTHER; note = 2'-O-methyluridine
tcattcccaataacagaatcggt

SEQ ID NO: 5491 - RNA, 23 nt, synthetic construct
  source 1..23: mol_type = other RNA
  modified_base 1: mod_base = OTHER; note = 2'-O-methyluridine-3'-phosphate 5'phosphate
  modified_base 2: mod_base = OTHER; note = 2'-deoxy-2'-fluorouridine-3'-phosphate
  modified_base 3: mod_base = OTHER; note = 2'-O-methylcytidine-3'-phosphate
  modified_base 4: mod_base = OTHER; note = 2'-O-methyladenosine-3'-phosphate
  modified_base 5: mod_base = OTHER; note = 2'-O-methyluridine-3'-phosphate
  modified_base 6: mod_base = OTHER; note = 2'-deoxy-2'-fluorouridine-3'-phosphate
  modified_base 7: mod_base = OTHER; note = 2'-O-methylcytidine-3'-phosphate
  modified_base 8: mod_base = OTHER; note = 2'-O-methylcytidine-3'-phosphate
  modified_base 9: mod_base = OTHER; note = 2'-O-methylcytidine-3'-phosphate
  modified_base 10: mod_base = OTHER; note = 2'-O-methyladenosine-3'-phosphate
  modified_base 11: mod_base = OTHER; note = 2'-O-methyladenosine-3'-phosphate
  modified_base 12: mod_base = OTHER; note = 2'-O-methyluridine-3'-phosphate
  modified_base 13: mod_base = OTHER; note = 2'-O-methyladenosine-3'-phosphate
  modified_base 14: mod_base = OTHER; note = 2'-deoxy-2'-fluoroadenosine-3'-phosphate
  modified_base 15: mod_base = OTHER; note = 2'-O-methylcytidine-3'-phosphate
  modified_base 16: mod_base = OTHER; note = 2'-deoxy-2'-fluoroadenosine-3'-phosphate
  modified_base 17: mod_base = OTHER; note = 2'-O-methylguanosine-3'-phosphate
  modified_base 18: mod_base = OTHER; note = 2'-O-methyladenosine-3'-phosphate
  modified_base 19: mod_base = OTHER; note = 2'-O-methyladenosine-3'-phosphate
  modified_base 20: mod_base = OTHER; note = 2'-O-methyluridine-3'-phosphate
  modified_base 21: mod_base = OTHER; note = 2'-O-methylcytidine-3'-phosphate
  modified_base 22: mod_base = OTHER; note = 2'-O-methylguanosine-3'-phosphate
  modified_base 23: mod_base = OTHER; note = 2'-O-methylguanosine
ttcattcccaataacagaatcgg

SEQ ID NO: 5492 - RNA, 23 nt, synthetic construct
  source 1..23: mol_type = other RNA
  modified_base 1: mod_base = OTHER; note = 2'-O-methyluridine-3'-phosphate 5'phosphate
  modified_base 2: mod_base = OTHER; note = 2'-deoxy-2'-fluorouridine-3'-phosphate
  modified_base 3: mod_base = OTHER; note = 2'-O-methyluridine-3'-phosphate
  modified_base 4: mod_base = OTHER; note = 2'-O-methylcytidine-3'-phosphate
  modified_base 5: mod_base = OTHER; note = 2'-O-methyladenosine-3'-phosphate
  modified_base 6: mod_base = OTHER; note = 2'-deoxy-2'-fluorouridine-3'-phosphate
  modified_base 7: mod_base = OTHER; note = 2'-O-methyluridine-3'-phosphate
  modified_base 8: mod_base = OTHER; note = 2'-O-methylcytidine-3'-phosphate
  modified_base 9: mod_base = OTHER; note = 2'-O-methylcytidine-3'-phosphate
  modified_base 10: mod_base = OTHER; note = 2'-O-methylcytidine-3'-phosphate
  modified_base 11: mod_base = OTHER; note = 2'-O-methyladenosine-3'-phosphate
  modified_base 12: mod_base = OTHER; note = 2'-O-methyladenosine-3'-phosphate
  modified_base 13: mod_base = OTHER; note = 2'-O-methyluridine-3'-phosphate
  modified_base 14: mod_base = OTHER; note = 2'-deoxy-2'-fluoroadenosine-3'-phosphate
  modified_base 15: mod_base = OTHER; note = 2'-O-methyladenosine-3'-phosphate
  modified_base 16: mod_base = OTHER; note = 2'-deoxy-2'-fluorocytidine-3'-phosphate
  modified_base 17: mod_base = OTHER; note = 2'-O-methyladenosine-3'-phosphate
  modified_base 18: mod_base = OTHER; note = 2'-O-methylguanosine-3'-phosphate
  modified_base 19: mod_base = OTHER; note = 2'-O-methyladenosine-3'-phosphate
  modified_base 20: mod_base = OTHER; note = 2'-O-methyladenosine-3'-phosphate
  modified_base 21: mod_base = OTHER; note = 2'-O-methyluridine-3'-phosphate
  modified_base 22: mod_base = OTHER; note = 2'-O-methylcytidine-3'-phosphate
  modified_base 23: mod_base = OTHER; note = 2'-O-methylguanosine
tttcattcccaataacagaatcg

SEQ ID NO: 5493 - RNA, 23 nt, synthetic construct
  source 1..23: mol_type = other RNA
  modified_base 1: mod_base = OTHER; note = 2'-O-methyluridine-3'-phosphate 5'phosphate
  modified_base 2: mod_base = OTHER; note = 2'-deoxy-2'-fluorouridine-3'-phosphate
  modified_base 3: mod_base = OTHER; note = 2'-O-methyluridine-3'-phosphate
  modified_base 4: mod_base = OTHER; note = 2'-O-methyluridine-3'-phosphate
  modified_base 5: mod_base = OTHER; note = 2'-O-methylcytidine-3'-phosphate
  modified_base 6: mod_base = OTHER; note = 2'-deoxy-2'-fluoroadenosine-3'-phosphate
  modified_base 7: mod_base = OTHER; note = 2'-O-methyluridine-3'-phosphate
  modified_base 8: mod_base = OTHER; note = 2'-O-methyluridine-3'-phosphate
  modified_base 9: mod_base = OTHER; note = 2'-O-methylcytidine-3'-phosphate
  modified_base 10: mod_base = OTHER; note = 2'-O-methylcytidine-3'-phosphate
  modified_base 11: mod_base = OTHER; note = 2'-O-methylcytidine-3'-phosphate
  modified_base 12: mod_base = OTHER; note = 2'-O-methyladenosine-3'-phosphate
  modified_base 13: mod_base = OTHER; note = 2'-O-methyladenosine-3'-phosphate
  modified_base 14: mod_base = OTHER; note = 2'-deoxy-2'-fluorouridine-3'-phosphate
  modified_base 15: mod_base = OTHER; note = 2'-O-methyladenosine-3'-phosphate
  modified_base 16: mod_base = OTHER; note = 2'-deoxy-2'-fluoroadenosine-3'-phosphate
  modified_base 17: mod_base = OTHER; note = 2'-O-methylcytidine-3'-phosphate
  modified_base 18: mod_base = OTHER; note = 2'-O-methyladenosine-3'-phosphate
  modified_base 19: mod_base = OTHER; note = 2'-O-methylguanosine-3'-phosphate
  modified_base 20: mod_base = OTHER; note = 2'-O-methyladenosine-3'-phosphate
  modified_base 21: mod_base = OTHER; note = 2'-O-methyladenosine-3'-phosphate
  modified_base 22: mod_base = OTHER; note = 2'-O-methyluridine-3'-phosphate
  modified_base 23: mod_base = OTHER; note = 2'-O-methylcytidine
ttttcattcccaataacagaatc

SEQ ID NO: 5494 - RNA, 23 nt, synthetic construct
  source 1..23: mol_type = other RNA
  modified_base 1: mod_base = OTHER; note = 2'-O-methyluridine-3'-phosphate 5'phosphate
  modified_base 2: mod_base = OTHER; note = 2'-deoxy-2'-fluoroadenosine-3'-phosphate
  modified_base 3: mod_base = OTHER; note = 2'-O-methyluridine-3'-phosphate
  modified_base 4: mod_base = OTHER; note = 2'-O-methyluridine-3'-phosphate
  modified_base 5: mod_base = OTHER; note = 2'-O-methyluridine-3'-phosphate
  modified_base 6: mod_base = OTHER; note = 2'-deoxy-2'-fluorocytidine-3'-phosphate
  modified_base 7: mod_base = OTHER; note = 2'-O-methyladenosine-3'-phosphate
  modified_base 8: mod_base = OTHER; note = 2'-O-methyluridine-3'-phosphate
  modified_base 9: mod_base = OTHER; note = 2'-O-methyluridine-3'-phosphate
  modified_base 10: mod_base = OTHER; note = 2'-O-methylcytidine-3'-phosphate
  modified_base 11: mod_base = OTHER; note = 2'-O-methylcytidine-3'-phosphate
  modified_base 12: mod_base = OTHER; note = 2'-O-methylcytidine-3'-phosphate
  modified_base 13: mod_base = OTHER; note = 2'-O-methyladenosine-3'-phosphate
  modified_base 14: mod_base = OTHER; note = 2'-deoxy-2'-fluoroadenosine-3'-phosphate
  modified_base 15: mod_base = OTHER; note = 2'-O-methyluridine-3'-phosphate
  modified_base 16: mod_base = OTHER; note = 2'-deoxy-2'-fluoroadenosine-3'-phosphate
  modified_base 17: mod_base = OTHER; note = 2'-O-methyladenosine-3'-phosphate
  modified_base 18: mod_base = OTHER; note = 2'-O-methylcytidine-3'-phosphate
  modified_base 19: mod_base = OTHER; note = 2'-O-methyladenosine-3'-phosphate
  modified_base 20: mod_base = OTHER; note = 2'-O-methylguanosine-3'-phosphate
  modified_base 21: mod_base = OTHER; note = 2'-O-methyladenosine-3'-phosphate
  modified_base 22: mod_base = OTHER; note = 2'-O-methyladenosine-3'-phosphate
  modified_base 23: mod_base = OTHER; note = 2'-O-methyluridine
tatttcattcccaataacagaat

SEQ ID NO: 5495 - RNA, 23 nt, synthetic construct
  source 1..23: mol_type = other RNA
  modified_base 1: mod_base = OTHER; note = 2'-O-methyluridine-3'-phosphate 5'phosphate
  modified_base 2: mod_base = OTHER; note = 2'-deoxy-2'-fluoroguanosine-3'-phosphate
  modified_base 3: mod_base = OTHER; note = 2'-O-methyladenosine-3'-phosphate
  modified_base 4: mod_base = OTHER; note = 2'-O-methyluridine-3'-phosphate
  modified_base 5: mod_base = OTHER; note = 2'-O-methyluridine-3'-phosphate
  modified_base 6: mod_base = OTHER; note = 2'-deoxy-2'-fluorouridine-3'-phosphate
  modified_base 7: mod_base = OTHER; note = 2'-O-methylcytidine-3'-phosphate
  modified_base 8: mod_base = OTHER; note = 2'-O-methyladenosine-3'-phosphate
  modified_base 9: mod_base = OTHER; note = 2'-O-methyluridine-3'-phosphate
  modified_base 10: mod_base = OTHER; note = 2'-O-methyluridine-3'-phosphate
  modified_base 11: mod_base = OTHER; note = 2'-O-methylcytidine-3'-phosphate
  modified_base 12: mod_base = OTHER; note = 2'-O-methylcytidine-3'-phosphate
  modified_base 13: mod_base = OTHER; note = 2'-O-methylcytidine-3'-phosphate
  modified_base 14: mod_base = OTHER; note = 2'-deoxy-2'-fluoroadenosine-3'-phosphate
  modified_base 15: mod_base = OTHER; note = 2'-O-methyladenosine-3'-phosphate
  modified_base 16: mod_base = OTHER; note = 2'-deoxy-2'-fluorouridine-3'-phosphate
  modified_base 17: mod_base = OTHER; note = 2'-O-methyladenosine-3'-phosphate
  modified_base 18: mod_base = OTHER; note = 2'-O-methyladenosine-3'-phosphate
  modified_base 19: mod_base = OTHER; note = 2'-O-methylcytidine-3'-phosphate
  modified_base 20: mod_base = OTHER; note = 2'-O-methyladenosine-3'-phosphate
  modified_base 21: mod_base = OTHER; note = 2'-O-methylguanosine-3'-phosphate
  modified_base 22: mod_base = OTHER; note = 2'-O-methyladenosine-3'-phosphate
  modified_base 23: mod_base = OTHER; note = 2'-O-methyladenosine
tgatttcattcccaataacagaa

SEQ ID NO: 5496 - RNA, 23 nt, synthetic construct
  source 1..23: mol_type = other RNA
  modified_base 1: mod_base = OTHER; note = 2'-O-methyluridine-3'-phosphate 5'phosphate
  modified_base 2: mod_base = OTHER; note = 2'-deoxy-2'-fluoroadenosine-3'-phosphate
  modified_base 3: mod_base = OTHER; note = 2'-O-methylguanosine-3'-phosphate
  modified_base 4: mod_base = OTHER; note = 2'-O-methyladenosine-3'-phosphate
  modified_base 5: mod_base = OTHER; note = 2'-O-methyluridine-3'-phosphate
  modified_base 6: mod_base = OTHER; note = 2'-deoxy-2'-fluorouridine-3'-phosphate
  modified_base 7: mod_base = OTHER; note = 2'-O-methyluridine-3'-phosphate
  modified_base 8: mod_base = OTHER; note = 2'-O-methylcytidine-3'-phosphate
  modified_base 9: mod_base = OTHER; note = 2'-O-methyladenosine-3'-phosphate
  modified_base 10: mod_base = OTHER; note = 2'-O-methyluridine-3'-phosphate
  modified_base 11: mod_base = OTHER; note = 2'-O-methyluridine-3'-phosphate
  modified_base 12: mod_base = OTHER; note = 2'-O-methylcytidine-3'-phosphate
  modified_base 13: mod_base = OTHER; note = 2'-O-methylcytidine-3'-phosphate
  modified_base 14: mod_base = OTHER; note = 2'-deoxy-2'-fluorocytidine-3'-phosphate
  modified_base 15: mod_base = OTHER; note = 2'-O-methyladenosine-3'-phosphate
  modified_base 16: mod_base = OTHER; note = 2'-deoxy-2'-fluoroadenosine-3'-phosphate
  modified_base 17: mod_base = OTHER; note = 2'-O-methyluridine-3'-phosphate
  modified_base 18: mod_base = OTHER; note = 2'-O-methyladenosine-3'-phosphate
  modified_base 19: mod_base = OTHER; note = 2'-O-methyladenosine-3'-phosphate
  modified_base 20: mod_base = OTHER; note = 2'-O-methylcytidine-3'-phosphate
  modified_base 21: mod_base = OTHER; note = 2'-O-methyladenosine-3'-phosphate
  modified_base 22: mod_base = OTHER; note = 2'-O-methylguanosine-3'-phosphate
  modified_base 23: mod_base = OTHER; note = 2'-O-methyladenosine
tagatttcattcccaataacaga

SEQ ID NO: 5497 - RNA, 23 nt, synthetic construct
  source 1..23: mol_type = other RNA
  modified_base 1: mod_base = OTHER; note = 2'-O-methyluridine-3'-phosphate 5'phosphate
  modified_base 2: mod_base = OTHER; note = 2'-deoxy-2'-fluorocytidine-3'-phosphate
  modified_base 3: mod_base = OTHER; note = 2'-O-methyladenosine-3'-phosphate
  modified_base 4: mod_base = OTHER; note = 2'-O-methylguanosine-3'-phosphate
  modified_base 5: mod_base = OTHER; note = 2'-O-methyladenosine-3'-phosphate
  modified_base 6: mod_base = OTHER; note = 2'-deoxy-2'-fluorouridine-3'-phosphate
  modified_base 7: mod_base = OTHER; note = 2'-O-methyluridine-3'-phosphate
  modified_base 8: mod_base = OTHER; note = 2'-O-methyluridine-3'-phosphate
  modified_base 9: mod_base = OTHER; note = 2'-O-methylcytidine-3'-phosphate
  modified_base 10: mod_base = OTHER; note = 2'-O-methyladenosine-3'-phosphate
  modified_base 11: mod_base = OTHER; note = 2'-O-methyluridine-3'-phosphate
  modified_base 12: mod_base = OTHER; note = 2'-O-methyluridine-3'-phosphate
  modified_base 13: mod_base = OTHER; note = 2'-O-methylcytidine-3'-phosphate
  modified_base 14: mod_base = OTHER; note = 2'-deoxy-2'-fluorocytidine-3'-phosphate
  modified_base 15: mod_base = OTHER; note = 2'-O-methylcytidine-3'-phosphate
  modified_base 16: mod_base = OTHER; note = 2'-deoxy-2'-fluoroadenosine-3'-phosphate
  modified_base 17: mod_base = OTHER; note = 2'-O-methyladenosine-3'-phosphate
  modified_base 18: mod_base = OTHER; note = 2'-O-methyluridine-3'-phosphate
  modified_base 19: mod_base = OTHER; note = 2'-O-methyladenosine-3'-phosphate
  modified_base 20: mod_base = OTHER; note = 2'-O-methyladenosine-3'-phosphate
  modified_base 21: mod_base = OTHER; note = 2'-O-methylcytidine-3'-phosphate
  modified_base 22: mod_base = OTHER; note = 2'-O-methyladenosine-3'-phosphate
  modified_base 23: mod_base = OTHER; note = 2'-O-methylguanosine
tcagatttcattcccaataacag

SEQ ID NO: 5498 - RNA, 23 nt, synthetic construct
  source 1..23: mol_type = other RNA
  modified_base 1: mod_base = OTHER; note = 2'-O-methyluridine-3'-phosphate 5'phosphate
  modified_base 2: mod_base = OTHER; note = 2'-deoxy-2'-fluoroadenosine-3'-phosphate
  modified_base 3: mod_base = OTHER; note = 2'-O-methylcytidine-3'-phosphate
  modified_base 4: mod_base = OTHER; note = 2'-O-methyladenosine-3'-phosphate
  modified_base 5: mod_base = OTHER; note = 2'-O-methylguanosine-3'-phosphate
  modified_base 6: mod_base = OTHER; note = 2'-deoxy-2'-fluoroadenosine-3'-phosphate
  modified_base 7: mod_base = OTHER; note = 2'-O-methyluridine-3'-phosphate
  modified_base 8: mod_base = OTHER; note = 2'-O-methyluridine-3'-phosphate
  modified_base 9: mod_base = OTHER; note = 2'-O-methyluridine-3'-phosphate
  modified_base 10: mod_base = OTHER; note = 2'-O-methylcytidine-3'-phosphate
  modified_base 11: mod_base = OTHER; note = 2'-O-methyladenosine-3'-phosphate
  modified_base 12: mod_base = OTHER; note = 2'-O-methyluridine-3'-phosphate
  modified_base 13: mod_base = OTHER; note = 2'-O-methyluridine-3'-phosphate
  modified_base 14: mod_base = OTHER; note = 2'-deoxy-2'-fluorocytidine-3'-phosphate
  modified_base 15: mod_base = OTHER; note = 2'-O-methylcytidine-3'-phosphate
  modified_base 16: mod_base = OTHER; note = 2'-deoxy-2'-fluorocytidine-3'-phosphate
  modified_base 17: mod_base = OTHER; note = 2'-O-methyladenosine-3'-phosphate
  modified_base 18: mod_base = OTHER; note = 2'-O-methyladenosine-3'-phosphate
  modified_base 19: mod_base = OTHER; note = 2'-O-methyluridine-3'-phosphate
  modified_base 20: mod_base = OTHER; note = 2'-O-methyladenosine-3'-phosphate
  modified_base 21: mod_base = OTHER; note = 2'-O-methyladenosine-3'-phosphate
  modified_base 22: mod_base = OTHER; note = 2'-O-methylcytidine-3'-phosphate
  modified_base 23: mod_base = OTHER; note = 2'-O-methyladenosine
tacagatttcattcccaataaca

SEQ ID NO: 5499 - RNA, 23 nt, synthetic construct
  source 1..23: mol_type = other RNA
  modified_base 1: mod_base = OTHER; note = 2'-O-methyluridine-3'-phosphate 5'phosphate
  modified_base 2: mod_base = OTHER; note = 2'-deoxy-2'-fluorouridine-3'-phosphate
  modified_base 3: mod_base = OTHER; note = 2'-O-methylguanosine-3'-phosphate
  modified_base 4: mod_base = OTHER; note = 2'-O-methyladenosine-3'-phosphate
  modified_base 5: mod_base = OTHER; note = 2'-O-methylcytidine-3'-phosphate
  modified_base 6: mod_base = OTHER; note = 2'-deoxy-2'-fluoroadenosine-3'-phosphate
  modified_base 7: mod_base = OTHER; note = 2'-O-methylguanosine-3'-phosphate
  modified_base 8: mod_base = OTHER; note = 2'-O-methyladenosine-3'-phosphate
  modified_base 9: mod_base = OTHER; note = 2'-O-methyluridine-3'-phosphate
  modified_base 10: mod_base = OTHER; note = 2'-O-methyluridine-3'-phosphate
  modified_base 11: mod_base = OTHER; note = 2'-O-methyluridine-3'-phosphate
  modified_base 12: mod_base = OTHER; note = 2'-O-methylcytidine-3'-phosphate
  modified_base 13: mod_base = OTHER; note = 2'-O-methyladenosine-3'-phosphate
  modified_base 14: mod_base = OTHER; note = 2'-deoxy-2'-fluorouridine-3'-phosphate
  modified_base 15: mod_base = OTHER; note = 2'-O-methyluridine-3'-phosphate
  modified_base 16: mod_base = OTHER; note = 2'-deoxy-2'-fluorocytidine-3'-phosphate
  modified_base 17: mod_base = OTHER; note = 2'-O-methylcytidine-3'-phosphate
  modified_base 18: mod_base = OTHER; note = 2'-O-methylcytidine-3'-phosphate
  modified_base 19: mod_base = OTHER; note = 2'-O-methyladenosine-3'-phosphate
  modified_base 20: mod_base = OTHER; note = 2'-O-methyladenosine-3'-phosphate
  modified_base 21: mod_base = OTHER; note = 2'-O-methyluridine-3'-phosphate
  modified_base 22: mod_base = OTHER; note = 2'-O-methyladenosine-3'-phosphate
  modified_base 23: mod_base = OTHER; note = 2'-O-methyladenosine
ttgacagatttcattcccaataa

SEQ ID NO: 5500 - RNA, 23 nt, synthetic construct
  source 1..23: mol_type = other RNA
  modified_base 1: mod_base = OTHER; note = 2'-O-methyluridine-3'-phosphate 5'phosphate
  modified_base 2: mod_base = OTHER; note = 2'-deoxy-2'-fluoroadenosine-3'-phosphate
  modified_base 3: mod_base = OTHER; note = 2'-O-methylcytidine-3'-phosphate
  modified_base 4: mod_base = OTHER; note = 2'-O-methyluridine-3'-phosphate
  modified_base 5: mod_base = OTHER; note = 2'-O-methylcytidine-3'-phosphate
  modified_base 6: mod_base = OTHER; note = 2'-deoxy-2'-fluorocytidine-3'-phosphate
  modified_base 7: mod_base = OTHER; note = 2'-O-methyladenosine-3'-phosphate
  modified_base 8: mod_base = OTHER; note = 2'-O-methyluridine-3'-phosphate
  modified_base 9: mod_base = OTHER; note = 2'-O-methylcytidine-3'-phosphate
  modified_base 10: mod_base = OTHER; note = 2'-O-methyladenosine-3'-phosphate
  modified_base 11: mod_base = OTHER; note = 2'-O-methyluridine-3'-phosphate
  modified_base 12: mod_base = OTHER; note = 2'-O-methyladenosine-3'-phosphate
  modified_base 13: mod_base = OTHER; note = 2'-O-methyluridine-3'-phosphate
  modified_base 14: mod_base = OTHER; note = 2'-deoxy-2'-fluoroadenosine-3'-phosphate
  modified_base 15: mod_base = OTHER; note = 2'-O-methylcytidine-3'-phosphate
  modified_base 16: mod_base = OTHER; note = 2'-deoxy-2'-fluoroadenosine-3'-phosphate
  modified_base 17: mod_base = OTHER; note = 2'-O-methylguanosine-3'-phosphate
  modified_base 18: mod_base = OTHER; note = 2'-O-methylcytidine-3'-phosphate
  modified_base 19: mod_base = OTHER; note = 2'-O-methyluridine-3'-phosphate
  modified_base 20: mod_base = OTHER; note = 2'-O-methylcytidine-3'-phosphate
  modified_base 21: mod_base = OTHER; note = 2'-O-methyluridine-3'-phosphate
  modified_base 22: mod_base = OTHER; note = 2'-O-methylcytidine-3'-phosphate
  modified_base 23: mod_base = OTHER; note = 2'-O-methyluridine
tactccatcatatacagctctct

SEQ ID NO: 5501 - RNA, 23 nt, synthetic construct
  source 1..23: mol_type = other RNA
  modified_base 1: mod_base = OTHER; note = 2'-O-methyluridine-3'-phosphate 5'phosphate
  modified_base 2: mod_base = OTHER; note = 2'-deoxy-2'-fluorouridine-3'-phosphate
  modified_base 3: mod_base = OTHER; note = 2'-O-methyluridine-3'-phosphate
  modified_base 4: mod_base = OTHER; note = 2'-O-methylcytidine-3'-phosphate
  modified_base 5: mod_base = OTHER; note = 2'-O-methyladenosine-3'-phosphate
  modified_base 6: mod_base = OTHER; note = 2'-deoxy-2'-fluorocytidine-3'-phosphate
  modified_base 7: mod_base = OTHER; note = 2'-O-methyluridine-3'-phosphate
  modified_base 8: mod_base = OTHER; note = 2'-O-methylcytidine-3'-phosphate
  modified_base 9: mod_base = OTHER; note = 2'-O-methylcytidine-3'-phosphate
  modified_base 10: mod_base = OTHER; note = 2'-O-methyladenosine-3'-phosphate
  modified_base 11: mod_base = OTHER; note = 2'-O-methyluridine-3'-phosphate
  modified_base 12: mod_base = OTHER; note = 2'-O-methylcytidine-3'-phosphate
  modified_base 13: mod_base = OTHER; note = 2'-O-methyladenosine-3'-phosphate
  modified_base 14: mod_base = OTHER; note = 2'-deoxy-2'-fluorouridine-3'-phosphate
  modified_base 15: mod_base = OTHER; note = 2'-O-methyladenosine-3'-phosphate
  modified_base 16: mod_base = OTHER; note = 2'-deoxy-2'-fluorouridine-3'-phosphate
  modified_base 17: mod_base = OTHER; note = 2'-O-methyladenosine-3'-phosphate
  modified_base 18: mod_base = OTHER; note = 2'-O-methylcytidine-3'-phosphate
  modified_base 19: mod_base = OTHER; note = 2'-O-methyladenosine-3'-phosphate
  modified_base 20: mod_base = OTHER; note = 2'-O-methylguanosine-3'-phosphate
  modified_base 21: mod_base = OTHER; note = 2'-O-methylcytidine-3'-phosphate
  modified_base 22: mod_base = OTHER; note = 2'-O-methyluridine-3'-phosphate
  modified_base 23: mod_base = OTHER; note = 2'-O-methylcytidine
tttcactccatcatatacagctc

SEQ ID NO: 5502 - RNA, 23 nt, synthetic construct
  source 1..23: mol_type = other RNA
  modified_base 1: mod_base = OTHER; note = 2'-O-methyluridine-3'-phosphate 5'phosphate
  modified_base 2: mod_base = OTHER; note = 2'-deoxy-2'-fluorouridine-3'-phosphate
  modified_base 3: mod_base = OTHER; note = 2'-O-methylguanosine-3'-phosphate
  modified_base 4: mod_base = OTHER; note = 2'-O-methylguanosine-3'-phosphate
  modified_base 5: mod_base = OTHER; note = 2'-O-methyluridine-3'-phosphate
  modified_base 6: mod_base = OTHER; note = 2'-deoxy-2'-fluorocytidine-3'-phosphate
  modified_base 7: mod_base = OTHER; note = 2'-O-methyluridine-3'-phosphate
  modified_base 8: mod_base = OTHER; note = 2'-O-methyluridine-3'-phosphate
  modified_base 9: mod_base = OTHER; note = 2'-O-methylguanosine-3'-phosphate
  modified_base 10: mod_base = OTHER; note = 2'-O-methyluridine-3'-phosphate
  modified_base 11: mod_base = OTHER; note = 2'-O-methylguanosine-3'-phosphate
  modified_base 12: mod_base = OTHER; note = 2'-O-methyluridine-3'-phosphate
  modified_base 13: mod_base = OTHER; note = 2'-O-methyluridine-3'-phosphate
  modified_base 14: mod_base = OTHER; note = 2'-deoxy-2'-fluoroadenosine-3'-phosphate
  modified_base 15: mod_base = OTHER; note = 2'-O-methylcytidine-3'-phosphate
  modified_base 16: mod_base = OTHER; note = 2'-deoxy-2'-fluoroadenosine-3'-phosphate
  modified_base 17: mod_base = OTHER; note = 2'-O-methylcytidine-3'-phosphate
  modified_base 18: mod_base = OTHER; note = 2'-O-methyladenosine-3'-phosphate
  modified_base 19: mod_base = OTHER; note = 2'-O-methyluridine-3'-phosphate
  modified_base 20: mod_base = OTHER; note = 2'-O-methylcytidine-3'-phosphate
  modified_base 21: mod_base = OTHER; note = 2'-O-methylcytidine-3'-phosphate
  modified_base 22: mod_base = OTHER; note = 2'-O-methyladenosine-3'-phosphate
  modified_base 23: mod_base = OTHER; note = 2'-O-methyluridine
ttggtcttgtgttacacatccat

SEQ ID NO: 5503 - RNA, 23 nt, synthetic construct
  source 1..23: mol_type = other RNA
  modified_base 1: mod_base = OTHER; note = 2'-O-methyluridine-3'-phosphate 5'phosphate
  modified_base 2: mod_base = OTHER; note = 2'-deoxy-2'-fluorouridine-3'-phosphate
  modified_base 3: mod_base = OTHER; note = 2'-O-methyluridine-3'-phosphate
  modified_base 4: mod_base = OTHER; note = 2'-O-methylguanosine-3'-phosphate
  modified_base 5: mod_base = OTHER; note = 2'-O-methylguanosine-3'-phosphate
  modified_base 6: mod_base = OTHER; note = 2'-deoxy-2'-fluorouridine-3'-phosphate
  modified_base 7: mod_base = OTHER; note = 2'-O-methylcytidine-3'-phosphate
  modified_base 8: mod_base = OTHER; note = 2'-O-methyluridine-3'-phosphate
  modified_base 9: mod_base = OTHER; note = 2'-O-methyluridine-3'-phosphate
  modified_base 10: mod_base = OTHER; note = 2'-O-methylguanosine-3'-phosphate
  modified_base 11: mod_base = OTHER; note = 2'-O-methyluridine-3'-phosphate
  modified_base 12: mod_base = OTHER; note = 2'-O-methylguanosine-3'-phosphate
  modified_base 13: mod_base = OTHER; note = 2'-O-methyluridine-3'-phosphate
  modified_base 14: mod_base = OTHER; note = 2'-deoxy-2'-fluorouridine-3'-phosphate
  modified_base 15: mod_base = OTHER; note = 2'-O-methyladenosine-3'-phosphate
  modified_base 16: mod_base = OTHER; note = 2'-deoxy-2'-fluorocytidine-3'-phosphate
  modified_base 17: mod_base = OTHER; note = 2'-O-methyladenosine-3'-phosphate
  modified_base 18: mod_base = OTHER; note = 2'-O-methylcytidine-3'-phosphate
  modified_base 19: mod_base = OTHER; note = 2'-O-methyladenosine-3'-phosphate
  modified_base 20: mod_base = OTHER; note = 2'-O-methyluridine-3'-phosphate
  modified_base 21: mod_base = OTHER; note = 2'-O-methylcytidine-3'-phosphate
  modified_base 22: mod_base = OTHER; note = 2'-O-methylcytidine-3'-phosphate
  modified_base 23: mod_base = OTHER; note = 2'-O-methyladenosine
tttggtcttgtgttacacatcca

SEQ ID NO: 5504 - RNA, 23 nt, synthetic construct
  source 1..23: mol_type = other RNA
  modified_base 1: mod_base = OTHER; note = 2'-O-methyluridine-3'-phosphate 5'phosphate
  modified_base 2: mod_base = OTHER; note = 2'-deoxy-2'-fluorocytidine-3'-phosphate
  modified_base 3: mod_base = OTHER; note = 2'-O-methyladenosine-3'-phosphate
  modified_base 4: mod_base = OTHER; note = 2'-O-methylguanosine-3'-phosphate
  modified_base 5: mod_base = OTHER; note = 2'-O-methyluridine-3'-phosphate
  modified_base 6: mod_base = OTHER; note = 2'-deoxy-2'-fluorouridine-3'-phosphate
  modified_base 7: mod_base = OTHER; note = 2'-O-methylguanosine-3'-phosphate
  modified_base 8: mod_base = OTHER; note = 2'-O-methylguanosine-3'-phosphate
  modified_base 9: mod_base = OTHER; note = 2'-O-methyluridine-3'-phosphate
  modified_base 10: mod_base = OTHER; note = 2'-O-methylcytidine-3'-phosphate
  modified_base 11: mod_base = OTHER; note = 2'-O-methyluridine-3'-phosphate
  modified_base 12: mod_base = OTHER; note = 2'-O-methyluridine-3'-phosphate
  modified_base 13: mod_base = OTHER; note = 2'-O-methylguanosine-3'-phosphate
  modified_base 14: mod_base = OTHER; note = 2'-deoxy-2'-fluorouridine-3'-phosphate
  modified_base 15: mod_base = OTHER; note = 2'-O-methylguanosine-3'-phosphate
  modified_base 16: mod_base = OTHER; note = 2'-deoxy-2'-fluorouridine-3'-phosphate
  modified_base 17: mod_base = OTHER; note = 2'-O-methyluridine-3'-phosphate
  modified_base 18: mod_base = OTHER; note = 2'-O-methyladenosine-3'-phosphate
  modified_base 19: mod_base = OTHER; note = 2'-O-methylcytidine-3'-phosphate
  modified_base 20: mod_base = OTHER; note = 2'-O-methyladenosine-3'-phosphate
  modified_base 21: mod_base = OTHER; note = 2'-O-methylcytidine-3'-phosphate
  modified_base 22: mod_base = OTHER; note = 2'-O-methyladenosine-3'-phosphate
  modified_base 23: mod_base = OTHER; note = 2'-O-methyluridine
tcagttggtcttgtgttacacat

SEQ ID NO: 5505 - RNA, 23 nt, synthetic construct
  source 1..23: mol_type = other RNA
  modified_base 1: mod_base = OTHER; note = 2'-O-methyluridine-3'-phosphate 5'phosphate
  modified_base 2: mod_base = OTHER; note = 2'-deoxy-2'-fluorouridine-3'-phosphate
  modified_base 3: mod_base = OTHER; note = 2'-O-methylcytidine-3'-phosphate
  modified_base 4: mod_base = OTHER; note = 2'-O-methyladenosine-3'-phosphate
  modified_base 5: mod_base = OTHER; note = 2'-O-methylguanosine-3'-phosphate
  modified_base 6: mod_base = OTHER; note = 2'-deoxy-2'-fluorouridine-3'-phosphate
  modified_base 7: mod_base = OTHER; note = 2'-O-methyluridine-3'-phosphate
  modified_base 8: mod_base = OTHER; note = 2'-O-methylguanosine-3'-phosphate
  modified_base 9: mod_base = OTHER; note = 2'-O-methylguanosine-3'-phosphate
  modified_base 10: mod_base = OTHER; note = 2'-O-methyluridine-3'-phosphate
  modified_base 11: mod_base = OTHER; note = 2'-O-methylcytidine-3'-phosphate
  modified_base 12: mod_base = OTHER; note = 2'-O-methyluridine-3'-phosphate
  modified_base 13: mod_base = OTHER; note = 2'-O-methyluridine-3'-phosphate
  modified_base 14: mod_base = OTHER; note = 2'-deoxy-2'-fluoroguanosine-3'-phosphate
  modified_base 15: mod_base = OTHER; note = 2'-O-methyluridine-3'-phosphate
  modified_base 16: mod_base = OTHER; note = 2'-deoxy-2'-fluoroguanosine-3'-phosphate
  modified_base 17: mod_base = OTHER; note = 2'-O-methyluridine-3'-phosphate
  modified_base 18: mod_base = OTHER; note = 2'-O-methyluridine-3'-phosphate
  modified_base 19: mod_base = OTHER; note = 2'-O-methyladenosine-3'-phosphate
  modified_base 20: mod_base = OTHER; note = 2'-O-methylcytidine-3'-phosphate
  modified_base 21: mod_base = OTHER; note = 2'-O-methyladenosine-3'-phosphate
  modified_base 22: mod_base = OTHER; note = 2'-O-methylcytidine-3'-phosphate
  modified_base 23: mod_base = OTHER; note = 2'-O-methyladenosine
ttcagttggtcttgtgttacaca

SEQ ID NO: 5506 - RNA, 23 nt, synthetic construct
  source 1..23: mol_type = other RNA
  modified_base 1: mod_base = OTHER; note = 2'-O-methyluridine-3'-phosphate 5'phosphate
  modified_base 2: mod_base = OTHER; note = 2'-deoxy-2'-fluorouridine-3'-phosphate
  modified_base 3: mod_base = OTHER; note = 2'-O-methylcytidine-3'-phosphate
  modified_base 4: mod_base = OTHER; note = 2'-O-methyluridine-3'-phosphate
  modified_base 5: mod_base = OTHER; note = 2'-O-methylcytidine-3'-phosphate
  modified_base 6: mod_base = OTHER; note = 2'-deoxy-2'-fluoroadenosine-3'-phosphate
  modified_base 7: mod_base = OTHER; note = 2'-O-methylguanosine-3'-phosphate
  modified_base 8: mod_base = OTHER; note = 2'-O-methyluridine-3'-phosphate
  modified_base 9: mod_base = OTHER; note = 2'-O-methyluridine-3'-phosphate
  modified_base 10: mod_base = OTHER; note = 2'-O-methylguanosine-3'-phosphate
  modified_base 11: mod_base = OTHER; note = 2'-O-methylguanosine-3'-phosphate
  modified_base 12: mod_base = OTHER; note = 2'-O-methyluridine-3'-phosphate
  modified_base 13: mod_base = OTHER; note = 2'-O-methylcytidine-3'-phosphate
  modified_base 14: mod_base = OTHER; note = 2'-deoxy-2'-fluorouridine-3'-phosphate
  modified_base 15: mod_base = OTHER; note = 2'-O-methyluridine-3'-phosphate
  modified_base 16: mod_base = OTHER; note = 2'-deoxy-2'-fluoroguanosine-3'-phosphate
  modified_base 17: mod_base = OTHER; note = 2'-O-methyluridine-3'-phosphate
  modified_base 18: mod_base = OTHER; note = 2'-O-methylguanosine-3'-phosphate
  modified_base 19: mod_base = OTHER; note = 2'-O-methyluridine-3'-phosphate
  modified_base 20: mod_base = OTHER; note = 2'-O-methyluridine-3'-phosphate
  modified_base 21: mod_base = OTHER; note = 2'-O-methyladenosine-3'-phosphate
  modified_base 22: mod_base = OTHER; note = 2'-O-methylcytidine-3'-phosphate
  modified_base 23: mod_base = OTHER; note = 2'-O-methyladenosine
ttctcagttggtcttgtgttaca

SEQ ID NO: 5507 - RNA, 23 nt, synthetic construct
  source 1..23: mol_type = other RNA
  modified_base 1: mod_base = OTHER; note = 2'-O-methyluridine-3'-phosphate 5'phosphate
  modified_base 2: mod_base = OTHER; note = 2'-deoxy-2'-fluorouridine-3'-phosphate
  modified_base 3: mod_base = OTHER; note = 2'-O-methyladenosine-3'-phosphate
  modified_base 4: mod_base = OTHER; note = 2'-O-methyladenosine-3'-phosphate
  modified_base 5: mod_base = OTHER; note = 2'-O-methylcytidine-3'-phosphate
  modified_base 6: mod_base = OTHER; note = 2'-deoxy-2'-fluoroadenosine-3'-phosphate
  modified_base 7: mod_base = OTHER; note = 2'-O-methyluridine-3'-phosphate
  modified_base 8: mod_base = OTHER; note = 2'-O-methyluridine-3'-phosphate
  modified_base 9: mod_base = OTHER; note = 2'-O-methylcytidine-3'-phosphate
  modified_base 10: mod_base = OTHER; note = 2'-O-methyladenosine-3'-phosphate
  modified_base 11: mod_base = OTHER; note = 2'-O-methylguanosine-3'-phosphate
  modified_base 12: mod_base = OTHER; note = 2'-O-methyladenosine-3'-phosphate
  modified_base 13: mod_base = OTHER; note = 2'-O-methylcytidine-3'-phosphate
  modified_base 14: mod_base = OTHER; note = 2'-deoxy-2'-fluorouridine-3'-phosphate
  modified_base 15: mod_base = OTHER; note = 2'-O-methylcytidine-3'-phosphate
  modified_base 16: mod_base = OTHER; note = 2'-deoxy-2'-fluorouridine-3'-phosphate
  modified_base 17: mod_base = OTHER; note = 2'-O-methylcytidine-3'-phosphate
  modified_base 18: mod_base = OTHER; note = 2'-O-methyladenosine-3'-phosphate
  modified_base 19: mod_base = OTHER; note = 2'-O-methylguanosine-3'-phosphate
  modified_base 20: mod_base = OTHER; note = 2'-O-methyluridine-3'-phosphate
  modified_base 21: mod_base = OTHER; note = 2'-O-methyluridine-3'-phosphate
  modified_base 22: mod_base = OTHER; note = 2'-O-methylguanosine-3'-phosphate
  modified_base 23: mod_base = OTHER; note = 2'-O-methylguanosine
ttaacattcagactctcagttgg

SEQ ID NO: 5508 - RNA, 23 nt, synthetic construct
  source 1..23: mol_type = other RNA
  modified_base 1: mod_base = OTHER; note = 2'-O-methyluridine-3'-phosphate 5'phosphate
  modified_base 2: mod_base = OTHER; note = 2'-deoxy-2'-fluoroadenosine-3'-phosphate
  modified_base 3: mod_base = OTHER; note = 2'-O-methyluridine-3'-phosphate
  modified_base 4: mod_base = OTHER; note = 2'-O-methyladenosine-3'-phosphate
  modified_base 5: mod_base = OTHER; note = 2'-O-methyladenosine-3'-phosphate
  modified_base 6: mod_base = OTHER; note = 2'-deoxy-2'-fluorocytidine-3'-phosphate
  modified_base 7: mod_base = OTHER; note = 2'-O-methyladenosine-3'-phosphate
  modified_base 8: mod_base = OTHER; note = 2'-O-methyluridine-3'-phosphate
  modified_base 9: mod_base = OTHER; note = 2'-O-methyluridine-3'-phosphate
  modified_base 10: mod_base = OTHER; note = 2'-O-methylcytidine-3'-phosphate
  modified_base 11: mod_base = OTHER; note = 2'-O-methyladenosine-3'-phosphate
  modified_base 12: mod_base = OTHER; note = 2'-O-methylguanosine-3'-phosphate
  modified_base 13: mod_base = OTHER; note = 2'-O-methyladenosine-3'-phosphate
  modified_base 14: mod_base = OTHER; note = 2'-deoxy-2'-fluorocytidine-3'-phosphate
  modified_base 15: mod_base = OTHER; note = 2'-O-methyluridine-3'-phosphate
  modified_base 16: mod_base = OTHER; note = 2'-deoxy-2'-fluorocytidine-3'-phosphate
  modified_base 17: mod_base = OTHER; note = 2'-O-methyluridine-3'-phosphate
  modified_base 18: mod_base = OTHER; note = 2'-O-methylcytidine-3'-phosphate
  modified_base 19: mod_base = OTHER; note = 2'-O-methyladenosine-3'-phosphate
  modified_base 20: mod_base = OTHER; note = 2'-O-methylguanosine-3'-phosphate
  modified_base 21: mod_base = OTHER; note = 2'-O-methyluridine-3'-phosphate
  modified_base 22: mod_base = OTHER; note = 2'-O-methyluridine-3'-phosphate
  modified_base 23: mod_base = OTHER; note = 2'-O-methylguanosine
tataacattcagactctcagttg

SEQ ID NO: 5509 - RNA, 23 nt, synthetic construct
  source 1..23: mol_type = other RNA
  modified_base 1: mod_base = OTHER; note = 2'-O-methyluridine-3'-phosphate 5'phosphate
  modified_base 2: mod_base = OTHER; note = 2'-deoxy-2'-fluoroadenosine-3'-phosphate
  modified_base 3: mod_base = OTHER; note = 2'-O-methyladenosine-3'-phosphate
  modified_base 4: mod_base = OTHER; note = 2'-O-methyluridine-3'-phosphate
  modified_base 5: mod_base = OTHER; note = 2'-O-methyladenosine-3'-phosphate
  modified_base 6: mod_base = OTHER; note = 2'-deoxy-2'-fluoroadenosine-3'-phosphate
  modified_base 7: mod_base = OTHER; note = 2'-O-methylcytidine-3'-phosphate
  modified_base 8: mod_base = OTHER; note = 2'-O-methyladenosine-3'-phosphate
  modified_base 9: mod_base = OTHER; note = 2'-O-methyluridine-3'-phosphate
  modified_base 10: mod_base = OTHER; note = 2'-O-methyluridine-3'-phosphate
  modified_base 11: mod_base = OTHER; note = 2'-O-methylcytidine-3'-phosphate
  modified_base 12: mod_base = OTHER; note = 2'-O-methyladenosine-3'-phosphate
  modified_base 13: mod_base = OTHER; note = 2'-O-methylguanosine-3'-phosphate
  modified_base 14: mod_base = OTHER; note = 2'-deoxy-2'-fluoroadenosine-3'-phosphate
  modified_base 15: mod_base = OTHER; note = 2'-O-methylcytidine-3'-phosphate
  modified_base 16: mod_base = OTHER; note = 2'-deoxy-2'-fluorouridine-3'-phosphate
  modified_base 17: mod_base = OTHER; note = 2'-O-methylcytidine-3'-phosphate
  modified_base 18: mod_base = OTHER; note = 2'-O-methyluridine-3'-phosphate
  modified_base 19: mod_base = OTHER; note = 2'-O-methylcytidine-3'-phosphate
  modified_base 20: mod_base = OTHER; note = 2'-O-methyladenosine-3'-phosphate
  modified_base 21: mod_base = OTHER; note = 2'-O-methylguanosine-3'-phosphate
  modified_base 22: mod_base = OTHER; note = 2'-O-methyluridine-3'-phosphate
  modified_base 23: mod_base = OTHER; note = 2'-O-methyluridine
taataacattcagactctcagtt

SEQ ID NO: 5510 - RNA, 23 nt, synthetic construct
  source 1..23: mol_type = other RNA
  modified_base 1: mod_base = OTHER; note = 2'-O-methyluridine-3'-phosphate 5'phosphate
  modified_base 2: mod_base = OTHER; note = 2'-deoxy-2'-fluoroadenosine-3'-phosphate
  modified_base 3: mod_base = OTHER; note = 2'-O-methylguanosine-3'-phosphate
  modified_base 4: mod_base = OTHER; note = 2'-O-methyladenosine-3'-phosphate
  modified_base 5: mod_base = OTHER; note = 2'-O-methyladenosine-3'-phosphate
  modified_base 6: mod_base = OTHER; note = 2'-deoxy-2'-fluorouridine-3'-phosphate
  modified_base 7: mod_base = OTHER; note = 2'-O-methyladenosine-3'-phosphate
  modified_base 8: mod_base = OTHER; note = 2'-O-methyladenosine-3'-phosphate
  modified_base 9: mod_base = OTHER; note = 2'-O-methylcytidine-3'-phosphate
  modified_base 10: mod_base = OTHER; note = 2'-O-methyladenosine-3'-phosphate
  modified_base 11: mod_base = OTHER; note = 2'-O-methyluridine-3'-phosphate
  modified_base 12: mod_base = OTHER; note = 2'-O-methyluridine-3'-phosphate
  modified_base 13: mod_base = OTHER; note = 2'-O-methylcytidine-3'-phosphate
  modified_base 14: mod_base = OTHER; note = 2'-deoxy-2'-fluoroadenosine-3'-phosphate
  modified_base 15: mod_base = OTHER; note = 2'-O-methylguanosine-3'-phosphate
  modified_base 16: mod_base = OTHER; note = 2'-deoxy-2'-fluoroadenosine-3'-phosphate
  modified_base 17: mod_base = OTHER; note = 2'-O-methylcytidine-3'-phosphate
  modified_base 18: mod_base = OTHER; note = 2'-O-methyluridine-3'-phosphate
  modified_base 19: mod_base = OTHER; note = 2'-O-methylcytidine-3'-phosphate
  modified_base 20: mod_base = OTHER; note = 2'-O-methyluridine-3'-phosphate
  modified_base 21: mod_base = OTHER; note = 2'-O-methylcytidine-3'-phosphate
  modified_base 22: mod_base = OTHER; note = 2'-O-methyladenosine-3'-phosphate
  modified_base 23: mod_base = OTHER; note = 2'-O-methylguanosine
tagaataacattcagactctcag

SEQ ID NO: 5511 - RNA, 23 nt, synthetic construct
  source 1..23: mol_type = other RNA
  modified_base 1: mod_base = OTHER; note = 2'-O-methyluridine-3'-phosphate 5'phosphate
  modified_base 2: mod_base = OTHER; note = 2'-deoxy-2'-fluorocytidine-3'-phosphate
  modified_base 3: mod_base = OTHER; note = 2'-O-methylcytidine-3'-phosphate
  modified_base 4: mod_base = OTHER; note = 2'-O-methyladenosine-3'-phosphate
  modified_base 5: mod_base = OTHER; note = 2'-O-methylguanosine-3'-phosphate
  modified_base 6: mod_base = OTHER; note = 2'-deoxy-2'-fluoroadenosine-3'-phosphate
  modified_base 7: mod_base = OTHER; note = 2'-O-methyladenosine-3'-phosphate
  modified_base 8: mod_base = OTHER; note = 2'-O-methyluridine-3'-phosphate
  modified_base 9: mod_base = OTHER; note = 2'-O-methyladenosine-3'-phosphate
  modified_base 10: mod_base = OTHER; note = 2'-O-methyladenosine-3'-phosphate
  modified_base 11: mod_base = OTHER; note = 2'-O-methylcytidine-3'-phosphate
  modified_base 12: mod_base = OTHER; note = 2'-O-methyladenosine-3'-phosphate
  modified_base 13: mod_base = OTHER; note = 2'-O-methyluridine-3'-phosphate
  modified_base 14: mod_base = OTHER; note = 2'-deoxy-2'-fluorouridine-3'-phosphate
  modified_base 15: mod_base = OTHER; note = 2'-O-methylcytidine-3'-phosphate
  modified_base 16: mod_base = OTHER; note = 2'-deoxy-2'-fluoroadenosine-3'-phosphate
  modified_base 17: mod_base = OTHER; note = 2'-O-methylguanosine-3'-phosphate
  modified_base 18: mod_base = OTHER; note = 2'-O-methyladenosine-3'-phosphate
  modified_base 19: mod_base = OTHER; note = 2'-O-methylcytidine-3'-phosphate
  modified_base 20: mod_base = OTHER; note = 2'-O-methyluridine-3'-phosphate
  modified_base 21: mod_base = OTHER; note = 2'-O-methylcytidine-3'-phosphate
  modified_base 22: mod_base = OTHER; note = 2'-O-methyluridine-3'-phosphate
  modified_base 23: mod_base = OTHER; note = 2'-O-methylcytidine
tccagaataacattcagactctc

SEQ ID NO: 5512 - RNA, 23 nt, synthetic construct
  source 1..23: mol_type = other RNA
  modified_base 1: mod_base = OTHER; note = 2'-O-methyluridine-3'-phosphate 5'phosphate
  modified_base 2: mod_base = OTHER; note = 2'-deoxy-2'-fluorouridine-3'-phosphate
  modified_base 3: mod_base = OTHER; note = 2'-O-methylcytidine-3'-phosphate
  modified_base 4: mod_base = OTHER; note = 2'-O-methyladenosine-3'-phosphate
  modified_base 5: mod_base = OTHER; note = 2'-O-methyluridine-3'-phosphate
  modified_base 6: mod_base = OTHER; note = 2'-deoxy-2'-fluorouridine-3'-phosphate
  modified_base 7: mod_base = OTHER; note = 2'-O-methyluridine-3'-phosphate
  modified_base 8: mod_base = OTHER; note = 2'-O-methyladenosine-3'-phosphate
  modified_base 9: mod_base = OTHER; note = 2'-O-methylcytidine-3'-phosphate
  modified_base 10: mod_base = OTHER; note = 2'-O-methyladenosine-3'-phosphate
  modified_base 11: mod_base = OTHER; note = 2'-O-methyluridine-3'-phosphate
  modified_base 12: mod_base = OTHER; note = 2'-O-methylguanosine-3'-phosphate
  modified_base 13: mod_base = OTHER; note = 2'-O-methylcytidine-3'-phosphate
  modified_base 14: mod_base = OTHER; note = 2'-deoxy-2'-fluorouridine-3'-phosphate
  modified_base 15: mod_base = OTHER; note = 2'-O-methylcytidine-3'-phosphate
  modified_base 16: mod_base = OTHER; note = 2'-deoxy-2'-fluorouridine-3'-phosphate
  modified_base 17: mod_base = OTHER; note = 2'-O-methyluridine-3'-phosphate
  modified_base 18: mod_base = OTHER; note = 2'-O-methylguanosine-3'-phosphate
  modified_base 19: mod_base = OTHER; note = 2'-O-methylguanosine-3'-phosphate
  modified_base 20: mod_base = OTHER; note = 2'-O-methylcytidine-3'-phosphate
  modified_base 21: mod_base = OTHER; note = 2'-O-methyladenosine-3'-phosphate
  modified_base 22: mod_base = OTHER; note = 2'-O-methylcytidine-3'-phosphate
  modified_base 23: mod_base = OTHER; note = 2'-O-methylcytidine
ttcatttacatgctcttggcacc

SEQ ID NO: 5513 - RNA, 23 nt, synthetic construct
  source 1..23: mol_type = other RNA
  modified_base 1: mod_base = OTHER; note = 2'-O-methyluridine-3'-phosphate 5'phosphate
  modified_base 2: mod_base = OTHER; note = 2'-deoxy-2'-fluorouridine-3'-phosphate
  modified_base 3: mod_base = OTHER; note = 2'-O-methyluridine-3'-phosphate
  modified_base 4: mod_base = OTHER; note = 2'-O-methylcytidine-3'-phosphate
  modified_base 5: mod_base = OTHER; note = 2'-O-methyladenosine-3'-phosphate
  modified_base 6: mod_base = OTHER; note = 2'-deoxy-2'-fluorouridine-3'-phosphate
  modified_base 7: mod_base = OTHER; note = 2'-O-methyluridine-3'-phosphate
  modified_base 8: mod_base = OTHER; note = 2'-O-methyluridine-3'-phosphate
  modified_base 9: mod_base = OTHER; note = 2'-O-methyladenosine-3'-phosphate
  modified_base 10: mod_base = OTHER; note = 2'-O-methylcytidine-3'-phosphate
  modified_base 11: mod_base = OTHER; note = 2'-O-methyladenosine-3'-phosphate
  modified_base 12: mod_base = OTHER; note = 2'-O-methyluridine-3'-phosphate
  modified_base 13: mod_base = OTHER; note = 2'-O-methylguanosine-3'-phosphate
  modified_base 14: mod_base = OTHER; note = 2'-deoxy-2'-fluorocytidine-3'-phosphate
  modified_base 15: mod_base = OTHER; note = 2'-O-methyluridine-3'-phosphate
  modified_base 16: mod_base = OTHER; note = 2'-deoxy-2'-fluorocytidine-3'-phosphate
  modified_base 17: mod_base = OTHER; note = 2'-O-methyluridine-3'-phosphate
  modified_base 18: mod_base = OTHER; note = 2'-O-methyluridine-3'-phosphate
  modified_base 19: mod_base = OTHER; note = 2'-O-methylguanosine-3'-phosphate
  modified_base 20: mod_base = OTHER; note = 2'-O-methylguanosine-3'-phosphate
  modified_base 21: mod_base = OTHER; note = 2'-O-methylcytidine-3'-phosphate
  modified_base 22: mod_base = OTHER; note = 2'-O-methyladenosine-3'-phosphate
  modified_base 23: mod_base = OTHER; note = 2'-O-methylcytidine
tttcatttacatgctcttggcac

SEQ ID NO: 5514 - RNA, 23 nt, synthetic construct
  source 1..23: mol_type = other RNA
  modified_base 1: mod_base = OTHER; note = 2'-O-methyluridine-3'-phosphate 5'phosphate
  modified_base 2: mod_base = OTHER; note = 2'-deoxy-2'-fluoroguanosine-3'-phosphate
  modified_base 3: mod_base = OTHER; note = 2'-O-methyluridine-3'-phosphate
  modified_base 4: mod_base = OTHER; note = 2'-O-methyluridine-3'-phosphate
  modified_base 5: mod_base = OTHER; note = 2'-O-methylcytidine-3'-phosphate
  modified_base 6: mod_base = OTHER; note = 2'-deoxy-2'-fluoroadenosine-3'-phosphate
  modified_base 7: mod_base = OTHER; note = 2'-O-methyluridine-3'-phosphate
  modified_base 8: mod_base = OTHER; note = 2'-O-methyluridine-3'-phosphate
  modified_base 9: mod_base = OTHER; note = 2'-O-methyluridine-3'-phosphate
  modified_base 10: mod_base = OTHER; note = 2'-O-methyladenosine-3'-phosphate
  modified_base 11: mod_base = OTHER; note = 2'-O-methylcytidine-3'-phosphate
  modified_base 12: mod_base = OTHER; note = 2'-O-methyladenosine-3'-phosphate
  modified_base 13: mod_base = OTHER; note = 2'-O-methyluridine-3'-phosphate
  modified_base 14: mod_base = OTHER; note = 2'-deoxy-2'-fluoroguanosine-3'-phosphate
  modified_base 15: mod_base = OTHER; note = 2'-O-methylcytidine-3'-phosphate
  modified_base 16: mod_base = OTHER; note = 2'-deoxy-2'-fluorouridine-3'-phosphate
  modified_base 17: mod_base = OTHER; note = 2'-O-methylcytidine-3'-phosphate
  modified_base 18: mod_base = OTHER; note = 2'-O-methyluridine-3'-phosphate
  modified_base 19: mod_base = OTHER; note = 2'-O-methyluridine-3'-phosphate
  modified_base 20: mod_base = OTHER; note = 2'-O-methylguanosine-3'-phosphate
  modified_base 21: mod_base = OTHER; note = 2'-O-methylguanosine-3'-phosphate
  modified_base 22: mod_base = OTHER; note = 2'-O-methylcytidine-3'-phosphate
  modified_base 23: mod_base = OTHER; note = 2'-O-methyladenosine
tgttcatttacatgctcttggca

SEQ ID NO: 5515 - RNA, 23 nt, synthetic construct
  source 1..23: mol_type = other RNA
  modified_base 1: mod_base = OTHER; note = 2'-O-methyluridine-3'-phosphate 5'phosphate
  modified_base 2: mod_base = OTHER; note = 2'-deoxy-2'-fluorouridine-3'-phosphate
  modified_base 3: mod_base = OTHER; note = 2'-O-methylguanosine-3'-phosphate
  modified_base 4: mod_base = OTHER; note = 2'-O-methyluridine-3'-phosphate
  modified_base 5: mod_base = OTHER; note = 2'-O-methyluridine-3'-phosphate
  modified_base 6: mod_base = OTHER; note = 2'-deoxy-2'-fluorocytidine-3'-phosphate
  modified_base 7: mod_base = OTHER; note = 2'-O-methyladenosine-3'-phosphate
  modified_base 8: mod_base = OTHER; note = 2'-O-methyluridine-3'-phosphate
  modified_base 9: mod_base = OTHER; note = 2'-O-methyluridine-3'-phosphate
  modified_base 10: mod_base = OTHER; note = 2'-O-methyluridine-3'-phosphate
  modified_base 11: mod_base = OTHER; note = 2'-O-methyladenosine-3'-phosphate
  modified_base 12: mod_base = OTHER; note = 2'-O-methylcytidine-3'-phosphate
  modified_base 13: mod_base = OTHER; note = 2'-O-methyladenosine-3'-phosphate
  modified_base 14: mod_base = OTHER; note = 2'-deoxy-2'-fluorouridine-3'-phosphate
  modified_base 15: mod_base = OTHER; note = 2'-O-methylguanosine-3'-phosphate
  modified_base 16: mod_base = OTHER; note = 2'-deoxy-2'-fluorocytidine-3'-phosphate
  modified_base 17: mod_base = OTHER; note = 2'-O-methyluridine-3'-phosphate
  modified_base 18: mod_base = OTHER; note = 2'-O-methylcytidine-3'-phosphate
  modified_base 19: mod_base = OTHER; note = 2'-O-methyluridine-3'-phosphate
  modified_base 20: mod_base = OTHER; note = 2'-O-methyluridine-3'-phosphate
  modified_base 21: mod_base = OTHER; note = 2'-O-methylguanosine-3'-phosphate
  modified_base 22: mod_base = OTHER; note = 2'-O-methylguanosine-3'-phosphate
  modified_base 23: mod_base = OTHER; note = 2'-O-methylcytidine
ttgttcatttacatgctcttggc

SEQ ID NO: 5516 - RNA, 23 nt, synthetic construct
  source 1..23: mol_type = other RNA
  modified_base 1: mod_base = OTHER; note = 2'-O-methyluridine-3'-phosphate 5'phosphate
  modified_base 2: mod_base = OTHER; note = 2'-deoxy-2'-fluorouridine-3'-phosphate
  modified_base 3: mod_base = OTHER; note = 2'-O-methyluridine-3'-phosphate
  modified_base 4: mod_base = OTHER; note = 2'-O-methylguanosine-3'-phosphate
  modified_base 5: mod_base = OTHER; note = 2'-O-methyluridine-3'-phosphate
  modified_base 6: mod_base = OTHER; note = 2'-deoxy-2'-fluorouridine-3'-phosphate
  modified_base 7: mod_base = OTHER; note = 2'-O-methylcytidine-3'-phosphate
  modified_base 8: mod_base = OTHER; note = 2'-O-methyladenosine-3'-phosphate
  modified_base 9: mod_base = OTHER; note = 2'-O-methyluridine-3'-phosphate
  modified_base 10: mod_base = OTHER; note = 2'-O-methyluridine-3'-phosphate
  modified_base 11: mod_base = OTHER; note = 2'-O-methyluridine-3'-phosphate
  modified_base 12: mod_base = OTHER; note = 2'-O-methyladenosine-3'-phosphate
  modified_base 13: mod_base = OTHER; note = 2'-O-methylcytidine-3'-phosphate
  modified_base 14: mod_base = OTHER; note = 2'-deoxy-2'-fluoroadenosine-3'-phosphate
  modified_base 15: mod_base = OTHER; note = 2'-O-methyluridine-3'-phosphate
  modified_base 16: mod_base = OTHER; note = 2'-deoxy-2'-fluoroguanosine-3'-phosphate
  modified_base 17: mod_base = OTHER; note = 2'-O-methylcytidine-3'-phosphate
  modified_base 18: mod_base = OTHER; note = 2'-O-methyluridine-3'-phosphate
  modified_base 19: mod_base = OTHER; note = 2'-O-methylcytidine-3'-phosphate
  modified_base 20: mod_base = OTHER; note = 2'-O-methyluridine-3'-phosphate
  modified_base 21: mod_base = OTHER; note = 2'-O-methyluridine-3'-phosphate
  modified_base 22: mod_base = OTHER; note = 2'-O-methylguanosine-3'-phosphate
  modified_base 23: mod_base = OTHER; note = 2'-O-methylguanosine
tttgttcatttacatgctcttgg

SEQ ID NO: 5517 - RNA, 23 nt, synthetic construct
  source 1..23: mol_type = other RNA
  modified_base 1: mod_base = OTHER; note = 2'-O-methyluridine-3'-phosphate 5'phosphate
  modified_base 2: mod_base = OTHER; note = 2'-deoxy-2'-fluoroguanosine-3'-phosphate
  modified_base 3: mod_base = OTHER; note = 2'-O-methyluridine-3'-phosphate
  modified_base 4: mod_base = OTHER; note = 2'-O-methyluridine-3'-phosphate
  modified_base 5: mod_base = OTHER; note = 2'-O-methylguanosine-3'-phosphate
  modified_base 6: mod_base = OTHER; note = 2'-deoxy-2'-fluorouridine-3'-phosphate
  modified_base 7: mod_base = OTHER; note = 2'-O-methyluridine-3'-phosphate
  modified_base 8: mod_base = OTHER; note = 2'-O-methylcytidine-3'-phosphate
  modified_base 9: mod_base = OTHER; note = 2'-O-methyladenosine-3'-phosphate
  modified_base 10: mod_base = OTHER; note = 2'-O-methyluridine-3'-phosphate
  modified_base 11: mod_base = OTHER; note = 2'-O-methyluridine-3'-phosphate
  modified_base 12: mod_base = OTHER; note = 2'-O-methyluridine-3'-phosphate
  modified_base 13: mod_base = OTHER; note = 2'-O-methyladenosine-3'-phosphate
  modified_base 14: mod_base = OTHER; note = 2'-deoxy-2'-fluorocytidine-3'-phosphate
  modified_base 15: mod_base = OTHER; note = 2'-O-methyladenosine-3'-phosphate
  modified_base 16: mod_base = OTHER; note = 2'-deoxy-2'-fluorouridine-3'-phosphate
  modified_base 17: mod_base = OTHER; note = 2'-O-methylguanosine-3'-phosphate
  modified_base 18: mod_base = OTHER; note = 2'-O-methylcytidine-3'-phosphate
  modified_base 19: mod_base = OTHER; note = 2'-O-methyluridine-3'-phosphate
  modified_base 20: mod_base = OTHER; note = 2'-O-methylcytidine-3'-phosphate
  modified_base 21: mod_base = OTHER; note = 2'-O-methyluridine-3'-phosphate
  modified_base 22: mod_base = OTHER; note = 2'-O-methyluridine-3'-phosphate
  modified_base 23: mod_base = OTHER; note = 2'-O-methylguanosine
tgttgttcatttacatgctcttg

SEQ ID NO: 5518 - RNA, 23 nt, synthetic construct
  source 1..23: mol_type = other RNA
  modified_base 1: mod_base = OTHER; note = 2'-O-methyluridine-3'-phosphate 5'phosphate
  modified_base 2: mod_base = OTHER; note = 2'-deoxy-2'-fluorouridine-3'-phosphate
  modified_base 3: mod_base = OTHER; note = 2'-O-methylguanosine-3'-phosphate
  modified_base 4: mod_base = OTHER; note = 2'-O-methyluridine-3'-phosphate
  modified_base 5: mod_base = OTHER; note = 2'-O-methyluridine-3'-phosphate
  modified_base 6: mod_base = OTHER; note = 2'-deoxy-2'-fluoroguanosine-3'-phosphate
  modified_base 7: mod_base = OTHER; note = 2'-O-methyluridine-3'-phosphate
  modified_base 8: mod_base = OTHER; note = 2'-O-methyluridine-3'-phosphate
  modified_base 9: mod_base = OTHER; note = 2'-O-methylcytidine-3'-phosphate
  modified_base 10: mod_base = OTHER; note = 2'-O-methyladenosine-3'-phosphate
  modified_base 11: mod_base = OTHER; note = 2'-O-methyluridine-3'-phosphate
  modified_base 12: mod_base = OTHER; note = 2'-O-methyluridine-3'-phosphate
  modified_base 13: mod_base = OTHER; note = 2'-O-methyluridine-3'-phosphate
  modified_base 14: mod_base = OTHER; note = 2'-deoxy-2'-fluoroadenosine-3'-phosphate
  modified_base 15: mod_base = OTHER; note = 2'-O-methylcytidine-3'-phosphate
  modified_base 16: mod_base = OTHER; note = 2'-deoxy-2'-fluoroadenosine-3'-phosphate
  modified_base 17: mod_base = OTHER; note = 2'-O-methyluridine-3'-phosphate
  modified_base 18: mod_base = OTHER; note = 2'-O-methylguanosine-3'-phosphate
  modified_base 19: mod_base = OTHER; note = 2'-O-methylcytidine-3'-phosphate
  modified_base 20: mod_base = OTHER; note = 2'-O-methyluridine-3'-phosphate
  modified_base 21: mod_base = OTHER; note = 2'-O-methylcytidine-3'-phosphate
  modified_base 22: mod_base = OTHER; note = 2'-O-methyluridine-3'-phosphate
  modified_base 23: mod_base = OTHER; note = 2'-O-methyluridine
ttgttgttcatttacatgctctt

SEQ ID NO: 5519 - RNA, 23 nt, synthetic construct
  source 1..23: mol_type = other RNA
  modified_base 1: mod_base = OTHER; note = 2'-O-methyluridine-3'-phosphate 5'phosphate
  modified_base 2: mod_base = OTHER; note = 2'-deoxy-2'-fluorouridine-3'-phosphate
  modified_base 3: mod_base = OTHER; note = 2'-O-methyluridine-3'-phosphate
  modified_base 4: mod_base = OTHER; note = 2'-O-methylguanosine-3'-phosphate
  modified_base 5: mod_base = OTHER; note = 2'-O-methyluridine-3'-phosphate
  modified_base 6: mod_base = OTHER; note = 2'-deoxy-2'-fluorouridine-3'-phosphate
  modified_base 7: mod_base = OTHER; note = 2'-O-methylguanosine-3'-phosphate
  modified_base 8: mod_base = OTHER; note = 2'-O-methyluridine-3'-phosphate
  modified_base 9: mod_base = OTHER; note = 2'-O-methyluridine-3'-phosphate
  modified_base 10: mod_base = OTHER; note = 2'-O-methylcytidine-3'-phosphate
  modified_base 11: mod_base = OTHER; note = 2'-O-methyladenosine-3'-phosphate
  modified_base 12: mod_base = OTHER; note = 2'-O-methyluridine-3'-phosphate
  modified_base 13: mod_base = OTHER; note = 2'-O-methyluridine-3'-phosphate
  modified_base 14: mod_base = OTHER; note = 2'-deoxy-2'-fluorouridine-3'-phosphate
  modified_base 15: mod_base = OTHER; note = 2'-O-methyladenosine-3'-phosphate
  modified_base 16: mod_base = OTHER; note = 2'-deoxy-2'-fluorocytidine-3'-phosphate
  modified_base 17: mod_base = OTHER; note = 2'-O-methyladenosine-3'-phosphate
  modified_base 18: mod_base = OTHER; note = 2'-O-methyluridine-3'-phosphate
  modified_base 19: mod_base = OTHER; note = 2'-O-methylguanosine-3'-phosphate
  modified_base 20: mod_base = OTHER; note = 2'-O-methylcytidine-3'-phosphate
  modified_base 21: mod_base = OTHER; note = 2'-O-methyluridine-3'-phosphate
  modified_base 22: mod_base = OTHER; note = 2'-O-methylcytidine-3'-phosphate
  modified_base 23: mod_base = OTHER; note = 2'-O-methyluridine
tttgttgttcatttacatgctct

SEQ ID NO: 5520 - RNA, 23 nt, synthetic construct
  source 1..23: mol_type = other RNA
  modified_base 1: mod_base = OTHER; note = 2'-O-methyluridine-3'-phosphate 5'phosphate
  modified_base 2: mod_base = OTHER; note = 2'-deoxy-2'-fluorocytidine-3'-phosphate
  modified_base 3: mod_base = OTHER; note = 2'-O-methyluridine-3'-phosphate
  modified_base 4: mod_base = OTHER; note = 2'-O-methyluridine-3'-phosphate
  modified_base 5: mod_base = OTHER; note = 2'-O-methylguanosine-3'-phosphate
  modified_base 6: mod_base = OTHER; note = 2'-deoxy-2'-fluorouridine-3'-phosphate
  modified_base 7: mod_base = OTHER; note = 2'-O-methyluridine-3'-phosphate
  modified_base 8: mod_base = OTHER; note = 2'-O-methylguanosine-3'-phosphate
  modified_base 9: mod_base = OTHER; note = 2'-O-methyluridine-3'-phosphate
  modified_base 10: mod_base = OTHER; note = 2'-O-methyluridine-3'-phosphate
  modified_base 11: mod_base = OTHER; note = 2'-O-methylcytidine-3'-phosphate
  modified_base 12: mod_base = OTHER; note = 2'-O-methyladenosine-3'-phosphate
  modified_base 13: mod_base = OTHER; note = 2'-O-methyluridine-3'-phosphate
  modified_base 14: mod_base = OTHER; note = 2'-deoxy-2'-fluorouridine-3'-phosphate
  modified_base 15: mod_base = OTHER; note = 2'-O-methyluridine-3'-phosphate
  modified_base 16: mod_base = OTHER; note = 2'-deoxy-2'-fluoroadenosine-3'-phosphate
  modified_base 17: mod_base = OTHER; note = 2'-O-methylcytidine-3'-phosphate
  modified_base 18: mod_base = OTHER; note = 2'-O-methyladenosine-3'-phosphate
  modified_base 19: mod_base = OTHER; note = 2'-O-methyluridine-3'-phosphate
  modified_base 20: mod_base = OTHER; note = 2'-O-methylguanosine-3'-phosphate
  modified_base 21: mod_base = OTHER; note = 2'-O-methylcytidine-3'-phosphate
  modified_base 22: mod_base = OTHER; note = 2'-O-methyluridine-3'-phosphate
  modified_base 23: mod_base = OTHER; note = 2'-O-methylcytidine
tcttgttgttcatttacatgctc

SEQ ID NO: 5521 - RNA, 23 nt, synthetic construct
  source 1..23: mol_type = other RNA
  modified_base 1: mod_base = OTHER; note = 2'-O-methyluridine-3'-phosphate 5'phosphate
  modified_base 2: mod_base = OTHER; note = 2'-deoxy-2'-fluoroguanosine-3'-phosphate
  modified_base 3: mod_base = OTHER; note = 2'-O-methylcytidine-3'-phosphate
  modified_base 4: mod_base = OTHER; note = 2'-O-methyluridine-3'-phosphate
  modified_base 5: mod_base = OTHER; note = 2'-O-methyluridine-3'-phosphate
  modified_base 6: mod_base = OTHER; note = 2'-deoxy-2'-fluoroguanosine-3'-phosphate
  modified_base 7: mod_base = OTHER; note = 2'-O-methyluridine-3'-phosphate
  modified_base 8: mod_base = OTHER; note = 2'-O-methyluridine-3'-phosphate
  modified_base 9: mod_base = OTHER; note = 2'-O-methylguanosine-3'-phosphate
  modified_base 10: mod_base = OTHER; note = 2'-O-methyluridine-3'-phosphate
  modified_base 11: mod_base = OTHER; note = 2'-O-methyluridine-3'-phosphate
  modified_base 12: mod_base = OTHER; note = 2'-O-methylcytidine-3'-phosphate
  modified_base 13: mod_base = OTHER; note = 2'-O-methyladenosine-3'-phosphate
  modified_base 14: mod_base = OTHER; note = 2'-deoxy-2'-fluorouridine-3'-phosphate
  modified_base 15: mod_base = OTHER; note = 2'-O-methyluridine-3'-phosphate
  modified_base 16: mod_base = OTHER; note = 2'-deoxy-2'-fluorouridine-3'-phosphate
  modified_base 17: mod_base = OTHER; note = 2'-O-methyladenosine-3'-phosphate
  modified_base 18: mod_base = OTHER; note = 2'-O-methylcytidine-3'-phosphate
  modified_base 19: mod_base = OTHER; note = 2'-O-methyladenosine-3'-phosphate
  modified_base 20: mod_base = OTHER; note = 2'-O-methyluridine-3'-phosphate
  modified_base 21: mod_base = OTHER; note = 2'-O-methylguanosine-3'-phosphate
  modified_base 22: mod_base = OTHER; note = 2'-O-methylcytidine-3'-phosphate
  modified_base 23: mod_base = OTHER; note = 2'-O-methyluridine
tgcttgttgttcatttacatgct

SEQ ID NO: 5522 - RNA, 23 nt, synthetic construct
  source 1..23: mol_type = other RNA
  modified_base 1: mod_base = OTHER; note = 2'-O-methyluridine-3'-phosphate 5'phosphate
  modified_base 2: mod_base = OTHER; note = 2'-deoxy-2'-fluorouridine-3'-phosphate
  modified_base 3: mod_base = OTHER; note = 2'-O-methylguanosine-3'-phosphate
  modified_base 4: mod_base = OTHER; note = 2'-O-methylcytidine-3'-phosphate
  modified_base 5: mod_base = OTHER; note = 2'-O-methyluridine-3'-phosphate
  modified_base 6: mod_base = OTHER; note = 2'-deoxy-2'-fluorouridine-3'-phosphate
  modified_base 7: mod_base = OTHER; note = 2'-O-methylguanosine-3'-phosphate
  modified_base 8: mod_base = OTHER; note = 2'-O-methyluridine-3'-phosphate
  modified_base 9: mod_base = OTHER; note = 2'-O-methyluridine-3'-phosphate
  modified_base 10: mod_base = OTHER; note = 2'-O-methylguanosine-3'-phosphate
  modified_base 11: mod_base = OTHER; note = 2'-O-methyluridine-3'-phosphate
  modified_base 12: mod_base = OTHER; note = 2'-O-methyluridine-3'-phosphate
  modified_base 13: mod_base = OTHER; note = 2'-O-methylcytidine-3'-phosphate
  modified_base 14: mod_base = OTHER; note = 2'-deoxy-2'-fluoroadenosine-3'-phosphate
  modified_base 15: mod_base = OTHER; note = 2'-O-methyluridine-3'-phosphate
  modified_base 16: mod_base = OTHER; note = 2'-deoxy-2'-fluorouridine-3'-phosphate
  modified_base 17: mod_base = OTHER; note = 2'-O-methyluridine-3'-phosphate
  modified_base 18: mod_base = OTHER; note = 2'-O-methyladenosine-3'-phosphate
  modified_base 19: mod_base = OTHER; note = 2'-O-methylcytidine-3'-phosphate
  modified_base 20: mod_base = OTHER; note = 2'-O-methyladenosine-3'-phosphate
  modified_base 21: mod_base = OTHER; note = 2'-O-methyluridine-3'-phosphate
  modified_base 22: mod_base = OTHER; note = 2'-O-methylguanosine-3'-phosphate
  modified_base 23: mod_base = OTHER; note = 2'-O-methylcytidine
ttgcttgttgttcatttacatgc

SEQ ID NO: 5523 - RNA, 23 nt, synthetic construct
  source 1..23: mol_type = other RNA
  modified_base 1: mod_base = OTHER; note = 2'-O-methyluridine-3'-phosphate 5'phosphate
  modified_base 2: mod_base = OTHER; note = 2'-deoxy-2'-fluorouridine-3'-phosphate
  modified_base 3: mod_base = OTHER; note = 2'-O-methyluridine-3'-phosphate
  modified_base 4: mod_base = OTHER; note = 2'-O-methylguanosine-3'-phosphate
  modified_base 5: mod_base = OTHER; note = 2'-O-methylcytidine-3'-phosphate
  modified_base 6: mod_base = OTHER; note = 2'-deoxy-2'-fluorouridine-3'-phosphate
  modified_base 7: mod_base = OTHER; note = 2'-O-methyluridine-3'-phosphate
  modified_base 8: mod_base = OTHER; note = 2'-O-methylguanosine-3'-phosphate
  modified_base 9: mod_base = OTHER; note = 2'-O-methyluridine-3'-phosphate
  modified_base 10: mod_base = OTHER; note = 2'-O-methyluridine-3'-phosphate
  modified_base 11: mod_base = OTHER; note = 2'-O-methylguanosine-3'-phosphate
  modified_base 12: mod_base = OTHER; note = 2'-O-methyluridine-3'-phosphate
  modified_base 13: mod_base = OTHER; note = 2'-O-methyluridine-3'-phosphate
  modified_base 14: mod_base = OTHER; note = 2'-deoxy-2'-fluorocytidine-3'-phosphate
  modified_base 15: mod_base = OTHER; note = 2'-O-methyladenosine-3'-phosphate
  modified_base 16: mod_base = OTHER; note = 2'-deoxy-2'-fluorouridine-3'-phosphate
  modified_base 17: mod_base = OTHER; note = 2'-O-methyluridine-3'-phosphate
  modified_base 18: mod_base = OTHER; note = 2'-O-methyluridine-3'-phosphate
  modified_base 19: mod_base = OTHER; note = 2'-O-methyladenosine-3'-phosphate
  modified_base 20: mod_base = OTHER; note = 2'-O-methylcytidine-3'-phosphate
  modified_base 21: mod_base = OTHER; note = 2'-O-methyladenosine-3'-phosphate
  modified_base 22: mod_base = OTHER; note = 2'-O-methyluridine-3'-phosphate
  modified_base 23: mod_base = OTHER; note = 2'-O-methylguanosine
tttgcttgttgttcatttacatg

SEQ ID NO: 5524 - RNA, 23 nt, synthetic construct
  source 1..23: mol_type = other RNA
  modified_base 1: mod_base = OTHER; note = 2'-O-methyluridine-3'-phosphate 5'phosphate
  modified_base 2: mod_base = OTHER; note = 2'-deoxy-2'-fluorouridine-3'-phosphate
  modified_base 3: mod_base = OTHER; note = 2'-O-methyluridine-3'-phosphate
  modified_base 4: mod_base = OTHER; note = 2'-O-methyluridine-3'-phosphate
  modified_base 5: mod_base = OTHER; note = 2'-O-methylguanosine-3'-phosphate
  modified_base 6: mod_base = OTHER; note = 2'-deoxy-2'-fluorocytidine-3'-phosphate
  modified_base 7: mod_base = OTHER; note = 2'-O-methyluridine-3'-phosphate
  modified_base 8: mod_base = OTHER; note = 2'-O-methyluridine-3'-phosphate
  modified_base 9: mod_base = OTHER; note = 2'-O-methylguanosine-3'-phosphate
  modified_base 10: mod_base = OTHER; note = 2'-O-methyluridine-3'-phosphate
  modified_base 11: mod_base = OTHER; note = 2'-O-methyluridine-3'-phosphate
  modified_base 12: mod_base = OTHER; note = 2'-O-methylguanosine-3'-phosphate
  modified_base 13: mod_base = OTHER; note = 2'-O-methyluridine-3'-phosphate
  modified_base 14: mod_base = OTHER; note = 2'-deoxy-2'-fluorouridine-3'-phosphate
  modified_base 15: mod_base = OTHER; note = 2'-O-methylcytidine-3'-phosphate
  modified_base 16: mod_base = OTHER; note = 2'-deoxy-2'-fluoroadenosine-3'-phosphate
  modified_base 17: mod_base = OTHER; note = 2'-O-methyluridine-3'-phosphate
  modified_base 18: mod_base = OTHER; note = 2'-O-methyluridine-3'-phosphate
  modified_base 19: mod_base = OTHER; note = 2'-O-methyluridine-3'-phosphate
  modified_base 20: mod_base = OTHER; note = 2'-O-methyladenosine-3'-phosphate
  modified_base 21: mod_base = OTHER; note = 2'-O-methylcytidine-3'-phosphate
  modified_base 22: mod_base = OTHER; note = 2'-O-methyladenosine-3'-phosphate
  modified_base 23: mod_base = OTHER; note = 2'-O-methyluridine
ttttgcttgttgttcatttacat

SEQ ID NO: 5525 - RNA, 23 nt, synthetic construct
  source 1..23: mol_type = other RNA
  modified_base 1: mod_base = OTHER; note = 2'-O-methyluridine-3'-phosphate 5'phosphate
  modified_base 2: mod_base = OTHER; note = 2'-deoxy-2'-fluoroadenosine-3'-phosphate
  modified_base 3: mod_base = OTHER; note = 2'-O-methyluridine-3'-phosphate
  modified_base 4: mod_base = OTHER; note = 2'-O-methyluridine-3'-phosphate
  modified_base 5: mod_base = OTHER; note = 2'-O-methyluridine-3'-phosphate
  modified_base 6: mod_base = OTHER; note = 2'-deoxy-2'-fluoroguanosine-3'-phosphate
  modified_base 7: mod_base = OTHER; note = 2'-O-methylcytidine-3'-phosphate
  modified_base 8: mod_base = OTHER; note = 2'-O-methyluridine-3'-phosphate
  modified_base 9: mod_base = OTHER; note = 2'-O-methyluridine-3'-phosphate
  modified_base 10: mod_base = OTHER; note = 2'-O-methylguanosine-3'-phosphate
  modified_base 11: mod_base = OTHER; note = 2'-O-methyluridine-3'-phosphate
  modified_base 12: mod_base = OTHER; note = 2'-O-methyluridine-3'-phosphate
  modified_base 13: mod_base = OTHER; note = 2'-O-methylguanosine-3'-phosphate
  modified_base 14: mod_base = OTHER; note = 2'-deoxy-2'-fluorouridine-3'-phosphate
  modified_base 15: mod_base = OTHER; note = 2'-O-methyluridine-3'-phosphate
  modified_base 16: mod_base = OTHER; note = 2'-deoxy-2'-fluorocytidine-3'-phosphate
  modified_base 17: mod_base = OTHER; note = 2'-O-methyladenosine-3'-phosphate
  modified_base 18: mod_base = OTHER; note = 2'-O-methyluridine-3'-phosphate
  modified_base 19: mod_base = OTHER; note = 2'-O-methyluridine-3'-phosphate
  modified_base 20: mod_base = OTHER; note = 2'-O-methyluridine-3'-phosphate
  modified_base 21: mod_base = OTHER; note = 2'-O-methyladenosine-3'-phosphate
  modified_base 22: mod_base = OTHER; note = 2'-O-methylcytidine-3'-phosphate
  modified_base 23: mod_base = OTHER; note = 2'-O-methyladenosine
tatttgcttgttgttcatttaca

SEQ ID NO: 5526 - RNA, 23 nt, synthetic construct
  source 1..23: mol_type = other RNA
  modified_base 1: mod_base = OTHER; note = 2'-O-methyluridine-3'-phosphate 5'phosphate
  modified_base 2: mod_base = OTHER; note = 2'-deoxy-2'-fluorouridine-3'-phosphate
  modified_base 3: mod_base = OTHER; note = 2'-O-methyladenosine-3'-phosphate
  modified_base 4: mod_base = OTHER; note = 2'-O-methyluridine-3'-phosphate
  modified_base 5: mod_base = OTHER; note = 2'-O-methyluridine-3'-phosphate
  modified_base 6: mod_base = OTHER; note = 2'-deoxy-2'-fluorouridine-3'-phosphate
  modified_base 7: mod_base = OTHER; note = 2'-O-methylguanosine-3'-phosphate
  modified_base 8: mod_base = OTHER; note = 2'-O-methylcytidine-3'-phosphate
  modified_base 9: mod_base = OTHER; note = 2'-O-methyluridine-3'-phosphate
  modified_base 10: mod_base = OTHER; note = 2'-O-methyluridine-3'-phosphate
  modified_base 11: mod_base = OTHER; note = 2'-O-methylguanosine-3'-phosphate
  modified_base 12: mod_base = OTHER; note = 2'-O-methyluridine-3'-phosphate
  modified_base 13: mod_base = OTHER; note = 2'-O-methyluridine-3'-phosphate
  modified_base 14: mod_base = OTHER; note = 2'-deoxy-2'-fluoroguanosine-3'-phosphate
  modified_base 15: mod_base = OTHER; note = 2'-O-methyluridine-3'-phosphate
  modified_base 16: mod_base = OTHER; note = 2'-deoxy-2'-fluorouridine-3'-phosphate
  modified_base 17: mod_base = OTHER; note = 2'-O-methylcytidine-3'-phosphate
  modified_base 18: mod_base = OTHER; note = 2'-O-methyladenosine-3'-phosphate
  modified_base 19: mod_base = OTHER; note = 2'-O-methyluridine-3'-phosphate
  modified_base 20: mod_base = OTHER; note = 2'-O-methyluridine-3'-phosphate
  modified_base 21: mod_base = OTHER; note = 2'-O-methyluridine-3'-phosphate
  modified_base 22: mod_base = OTHER; note = 2'-O-methyladenosine-3'-phosphate
  modified_base 23: mod_base = OTHER; note = 2'-O-methylcytidine
ttatttgcttgttgttcatttac

SEQ ID NO: 5527 - RNA, 23 nt, synthetic construct
  source 1..23: mol_type = other RNA
  modified_base 1: mod_base = OTHER; note = 2'-O-methyluridine-3'-phosphate 5'phosphate
  modified_base 2: mod_base = OTHER; note = 2'-deoxy-2'-fluoroadenosine-3'-phosphate
  modified_base 3: mod_base = OTHER; note = 2'-O-methyluridine-3'-phosphate
  modified_base 4: mod_base = OTHER; note = 2'-O-methyladenosine-3'-phosphate
  modified_base 5: mod_base = OTHER; note = 2'-O-methyluridine-3'-phosphate
  modified_base 6: mod_base = OTHER; note = 2'-deoxy-2'-fluorouridine-3'-phosphate
  modified_base 7: mod_base = OTHER; note = 2'-O-methyluridine-3'-phosphate
  modified_base 8: mod_base = OTHER; note = 2'-O-methylguanosine-3'-phosphate
  modified_base 9: mod_base = OTHER; note = 2'-O-methylcytidine-3'-phosphate
  modified_base 10: mod_base = OTHER; note = 2'-O-methyluridine-3'-phosphate
  modified_base 11: mod_base = OTHER; note = 2'-O-methyluridine-3'-phosphate
  modified_base 12: mod_base = OTHER; note = 2'-O-methylguanosine-3'-phosphate
  modified_base 13: mod_base = OTHER; note = 2'-O-methyluridine-3'-phosphate
  modified_base 14: mod_base = OTHER; note = 2'-deoxy-2'-fluorouridine-3'-phosphate
  modified_base 15: mod_base = OTHER; note = 2'-O-methylguanosine-3'-phosphate
  modified_base 16: mod_base = OTHER; note = 2'-deoxy-2'-fluorouridine-3'-phosphate
  modified_base 17: mod_base = OTHER; note = 2'-O-methyluridine-3'-phosphate
  modified_base 18: mod_base = OTHER; note = 2'-O-methylcytidine-3'-phosphate
  modified_base 19: mod_base = OTHER; note = 2'-O-methyladenosine-3'-phosphate
  modified_base 20: mod_base = OTHER; note = 2'-O-methyluridine-3'-phosphate
  modified_base 21: mod_base = OTHER; note = 2'-O-methyluridine-3'-phosphate
  modified_base 22: mod_base = OTHER; note = 2'-O-methyluridine-3'-phosphate
  modified_base 23: mod_base = OTHER; note = 2'-O-methyladenosine
tatatttgcttgttgttcattta

SEQ ID NO: 5528 - RNA, 23 nt, synthetic construct
  source 1..23: mol_type = other RNA
  modified_base 1: mod_base = OTHER; note = 2'-O-methyluridine-3'-phosphate 5'phosphate
  modified_base 2: mod_base = OTHER; note = 2'-deoxy-2'-fluoroadenosine-3'-phosphate
  modified_base 3: mod_base = OTHER; note = 2'-O-methyladenosine-3'-phosphate
  modified_base 4: mod_base = OTHER; note = 2'-O-methyluridine-3'-phosphate
  modified_base 5: mod_base = OTHER; note = 2'-O-methyladenosine-3'-phosphate
  modified_base 6: mod_base = OTHER; note = 2'-deoxy-2'-fluorouridine-3'-phosphate
  modified_base 7: mod_base = OTHER; note = 2'-O-methyluridine-3'-phosphate
  modified_base 8: mod_base = OTHER; note = 2'-O-methyluridine-3'-phosphate
  modified_base 9: mod_base = OTHER; note = 2'-O-methylguanosine-3'-phosphate
  modified_base 10: mod_base = OTHER; note = 2'-O-methylcytidine-3'-phosphate
  modified_base 11: mod_base = OTHER; note = 2'-O-methyluridine-3'-phosphate
  modified_base 12: mod_base = OTHER; note = 2'-O-methyluridine-3'-phosphate
  modified_base 13: mod_base = OTHER; note = 2'-O-methylguanosine-3'-phosphate
  modified_base 14: mod_base = OTHER; note = 2'-deoxy-2'-fluorouridine-3'-phosphate
  modified_base 15: mod_base = OTHER; note = 2'-O-methyluridine-3'-phosphate
  modified_base 16: mod_base = OTHER; note = 2'-deoxy-2'-fluoroguanosine-3'-phosphate
  modified_base 17: mod_base = OTHER; note = 2'-O-methyluridine-3'-phosphate
  modified_base 18: mod_base = OTHER; note = 2'-O-methyluridine-3'-phosphate
  modified_base 19: mod_base = OTHER; note = 2'-O-methylcytidine-3'-phosphate
  modified_base 20: mod_base = OTHER; note = 2'-O-methyladenosine-3'-phosphate
  modified_base 21: mod_base = OTHER; note = 2'-O-methyluridine-3'-phosphate
  modified_base 22: mod_base = OTHER; note = 2'-O-methyluridine-3'-phosphate
  modified_base 23: mod_base = OTHER; note = 2'-O-methyluridine
taatatttgcttgttgttcattt

SEQ ID NO: 5529 - RNA, 23 nt, synthetic construct
  source 1..23: mol_type = other RNA
  modified_base 1: mod_base = OTHER; note = 2'-O-methyluridine-3'-phosphate 5'phosphate
  modified_base 2: mod_base = OTHER; note = 2'-deoxy-2'-fluorocytidine-3'-phosphate
  modified_base 3: mod_base = OTHER; note = 2'-O-methyladenosine-3'-phosphate
  modified_base 4: mod_base = OTHER; note = 2'-O-methyladenosine-3'-phosphate
  modified_base 5: mod_base = OTHER; note = 2'-O-methyluridine-3'-phosphate
  modified_base 6: mod_base = OTHER; note = 2'-deoxy-2'-fluoroadenosine-3'-phosphate
  modified_base 7: mod_base = OTHER; note = 2'-O-methyluridine-3'-phosphate
  modified_base 8: mod_base = OTHER; note = 2'-O-methyluridine-3'-phosphate
  modified_base 9: mod_base = OTHER; note = 2'-O-methyluridine-3'-phosphate
  modified_base 10: mod_base = OTHER; note = 2'-O-methylguanosine-3'-phosphate
  modified_base 11: mod_base = OTHER; note = 2'-O-methylcytidine-3'-phosphate
  modified_base 12: mod_base = OTHER; note = 2'-O-methyluridine-3'-phosphate
  modified_base 13: mod_base = OTHER; note = 2'-O-methyluridine-3'-phosphate
  modified_base 14: mod_base = OTHER; note = 2'-deoxy-2'-fluoroguanosine-3'-phosphate
  modified_base 15: mod_base = OTHER; note = 2'-O-methyluridine-3'-phosphate
  modified_base 16: mod_base = OTHER; note = 2'-deoxy-2'-fluorouridine-3'-phosphate
  modified_base 17: mod_base = OTHER; note = 2'-O-methylguanosine-3'-phosphate
  modified_base 18: mod_base = OTHER; note = 2'-O-methyluridine-3'-phosphate
  modified_base 19: mod_base = OTHER; note = 2'-O-methyluridine-3'-phosphate
  modified_base 20: mod_base = OTHER; note = 2'-O-methylcytidine-3'-phosphate
  modified_base 21: mod_base = OTHER; note = 2'-O-methyladenosine-3'-phosphate
  modified_base 22: mod_base = OTHER; note = 2'-O-methyluridine-3'-phosphate
  modified_base 23: mod_base = OTHER; note = 2'-O-methyluridine
tcaatatttgcttgttgttcatt

SEQ ID NO: 5530 - RNA, 23 nt, synthetic construct
  source 1..23: mol_type = other RNA
  modified_base 1: mod_base = OTHER; note = 2'-O-methyluridine-3'-phosphate 5'phosphate
  modified_base 2: mod_base = OTHER; note = 2'-deoxy-2'-fluorouridine-3'-phosphate
  modified_base 3: mod_base = OTHER; note = 2'-O-methylcytidine-3'-phosphate
  modified_base 4: mod_base = OTHER; note = 2'-O-methyladenosine-3'-phosphate
  modified_base 5: mod_base = OTHER; note = 2'-O-methyladenosine-3'-phosphate
  modified_base 6: mod_base = OTHER; note = 2'-deoxy-2'-fluorouridine-3'-phosphate
  modified_base 7: mod_base = OTHER; note = 2'-O-methyladenosine-3'-phosphate
  modified_base 8: mod_base = OTHER; note = 2'-O-methyluridine-3'-phosphate
  modified_base 9: mod_base = OTHER; note = 2'-O-methyluridine-3'-phosphate
  modified_base 10: mod_base = OTHER; note = 2'-O-methyluridine-3'-phosphate
  modified_base 11: mod_base = OTHER; note = 2'-O-methylguanosine-3'-phosphate
  modified_base 12: mod_base = OTHER; note = 2'-O-methylcytidine-3'-phosphate
  modified_base 13: mod_base = OTHER; note = 2'-O-methyluridine-3'-phosphate
  modified_base 14: mod_base = OTHER; note = 2'-deoxy-2'-fluorouridine-3'-phosphate
  modified_base 15: mod_base = OTHER; note = 2'-O-methylguanosine-3'-phosphate
  modified_base 16: mod_base = OTHER; note = 2'-deoxy-2'-fluorouridine-3'-phosphate
  modified_base 17: mod_base = OTHER; note = 2'-O-methyluridine-3'-phosphate
  modified_base 18: mod_base = OTHER; note = 2'-O-methylguanosine-3'-phosphate
  modified_base 19: mod_base = OTHER; note = 2'-O-methyluridine-3'-phosphate
  modified_base 20: mod_base = OTHER; note = 2'-O-methyluridine-3'-phosphate
  modified_base 21: mod_base = OTHER; note = 2'-O-methylcytidine-3'-phosphate
  modified_base 22: mod_base = OTHER; note = 2'-O-methyladenosine-3'-phosphate
  modified_base 23: mod_base = OTHER; note = 2'-O-methyluridine
ttcaatatttgcttgttgttcat

SEQ ID NO: 5531 - RNA, 23 nt, synthetic construct
  source 1..23: mol_type = other RNA
  modified_base 1: mod_base = OTHER; note = 2'-O-methyluridine-3'-phosphate 5'phosphate
  modified_base 2: mod_base = OTHER; note = 2'-deoxy-2'-fluorouridine-3'-phosphate
  modified_base 3: mod_base = OTHER; note = 2'-O-methyluridine-3'-phosphate
  modified_base 4: mod_base = OTHER; note = 2'-O-methylcytidine-3'-phosphate
  modified_base 5: mod_base = OTHER; note = 2'-O-methyladenosine-3'-phosphate
  modified_base 6: mod_base = OTHER; note = 2'-deoxy-2'-fluoroadenosine-3'-phosphate
  modified_base 7: mod_base = OTHER; note = 2'-O-methyluridine-3'-phosphate
  modified_base 8: mod_base = OTHER; note = 2'-O-methyladenosine-3'-phosphate
  modified_base 9: mod_base = OTHER; note = 2'-O-methyluridine-3'-phosphate
  modified_base 10: mod_base = OTHER; note = 2'-O-methyluridine-3'-phosphate
  modified_base 11: mod_base = OTHER; note = 2'-O-methyluridine-3'-phosphate
  modified_base 12: mod_base = OTHER; note = 2'-O-methylguanosine-3'-phosphate
  modified_base 13: mod_base = OTHER; note = 2'-O-methylcytidine-3'-phosphate
  modified_base 14: mod_base = OTHER; note = 2'-deoxy-2'-fluorouridine-3'-phosphate
  modified_base 15: mod_base = OTHER; note = 2'-O-methyluridine-3'-phosphate
  modified_base 16: mod_base = OTHER; note = 2'-deoxy-2'-fluoroguanosine-3'-phosphate
  modified_base 17: mod_base = OTHER; note = 2'-O-methyluridine-3'-phosphate
  modified_base 18: mod_base = OTHER; note = 2'-O-methyluridine-3'-phosphate
  modified_base 19: mod_base = OTHER; note = 2'-O-methylguanosine-3'-phosphate
  modified_base 20: mod_base = OTHER; note = 2'-O-methyluridine-3'-phosphate
  modified_base 21: mod_base = OTHER; note = 2'-O-methyluridine-3'-phosphate
  modified_base 22: mod_base = OTHER; note = 2'-O-methylcytidine-3'-phosphate
  modified_base 23: mod_base = OTHER; note = 2'-O-methyladenosine
tttcaatatttgcttgttgttca

SEQ ID NO: 5532 - RNA, 23 nt, synthetic construct
  source 1..23: mol_type = other RNA
  modified_base 1: mod_base = OTHER; note = 2'-O-methyluridine-3'-phosphate 5'phosphate
  modified_base 2: mod_base = OTHER; note = 2'-deoxy-2'-fluorocytidine-3'-phosphate
  modified_base 3: mod_base = OTHER; note = 2'-O-methyluridine-3'-phosphate
  modified_base 4: mod_base = OTHER; note = 2'-O-methyluridine-3'-phosphate
  modified_base 5: mod_base = OTHER; note = 2'-O-methylcytidine-3'-phosphate
  modified_base 6: mod_base = OTHER; note = 2'-deoxy-2'-fluoroadenosine-3'-phosphate
  modified_base 7: mod_base = OTHER; note = 2'-O-methyladenosine-3'-phosphate
  modified_base 8: mod_base = OTHER; note = 2'-O-methyluridine-3'-phosphate
  modified_base 9: mod_base = OTHER; note = 2'-O-methyladenosine-3'-phosphate
  modified_base 10: mod_base = OTHER; note = 2'-O-methyluridine-3'-phosphate
  modified_base 11: mod_base = OTHER; note = 2'-O-methyluridine-3'-phosphate
  modified_base 12: mod_base = OTHER; note = 2'-O-methyluridine-3'-phosphate
  modified_base 13: mod_base = OTHER; note = 2'-O-methylguanosine-3'-phosphate
  modified_base 14: mod_base = OTHER; note = 2'-deoxy-2'-fluorocytidine-3'-phosphate
  modified_base 15: mod_base = OTHER; note = 2'-O-methyluridine-3'-phosphate
  modified_base 16: mod_base = OTHER; note = 2'-deoxy-2'-fluorouridine-3'-phosphate
  modified_base 17: mod_base = OTHER; note = 2'-O-methylguanosine-3'-phosphate
  modified_base 18: mod_base = OTHER; note = 2'-O-methyluridine-3'-phosphate
  modified_base 19: mod_base = OTHER; note = 2'-O-methyluridine-3'-phosphate
  modified_base 20: mod_base = OTHER; note = 2'-O-methylguanosine-3'-phosphate
  modified_base 21: mod_base = OTHER; note = 2'-O-methyluridine-3'-phosphate
  modified_base 22: mod_base = OTHER; note = 2'-O-methyluridine-3'-phosphate
  modified_base 23: mod_base = OTHER; note = 2'-O-methylcytidine
tcttcaatatttgcttgttgttc

SEQ ID NO: 5533 - RNA, 23 nt, synthetic construct
  source 1..23: mol_type = other RNA
  modified_base 1: mod_base = OTHER; note = 2'-O-methyluridine-3'-phosphate 5'phosphate
  modified_base 2: mod_base = OTHER; note = 2'-deoxy-2'-fluorocytidine-3'-phosphate
  modified_base 3: mod_base = OTHER; note = 2'-O-methylcytidine-3'-phosphate
  modified_base 4: mod_base = OTHER; note = 2'-O-methyluridine-3'-phosphate
  modified_base 5: mod_base = OTHER; note = 2'-O-methyluridine-3'-phosphate
  modified_base 6: mod_base = OTHER; note = 2'-deoxy-2'-fluorocytidine-3'-phosphate
  modified_base 7: mod_base = OTHER; note = 2'-O-methyladenosine-3'-phosphate
  modified_base 8: mod_base = OTHER; note = 2'-O-methyladenosine-3'-phosphate
  modified_base 9: mod_base = OTHER; note = 2'-O-methyluridine-3'-phosphate
  modified_base 10: mod_base = OTHER; note = 2'-O-methyladenosine-3'-phosphate
  modified_base 11: mod_base = OTHER; note = 2'-O-methyluridine-3'-phosphate
  modified_base 12: mod_base = OTHER; note = 2'-O-methyluridine-3'-phosphate
  modified_base 13: mod_base = OTHER; note = 2'-O-methyluridine-3'-phosphate
  modified_base 14: mod_base = OTHER; note = 2'-deoxy-2'-fluoroguanosine-3'-phosphate
  modified_base 15: mod_base = OTHER; note = 2'-O-methylcytidine-3'-phosphate
  modified_base 16: mod_base = OTHER; note = 2'-deoxy-2'-fluorouridine-3'-phosphate
  modified_base 17: mod_base = OTHER; note = 2'-O-methyluridine-3'-phosphate
  modified_base 18: mod_base = OTHER; note = 2'-O-methylguanosine-3'-phosphate
  modified_base 19: mod_base = OTHER; note = 2'-O-methyluridine-3'-phosphate
  modified_base 20: mod_base = OTHER; note = 2'-O-methyluridine-3'-phosphate
  modified_base 21: mod_base = OTHER; note = 2'-O-methylguanosine-3'-phosphate
  modified_base 22: mod_base = OTHER; note = 2'-O-methyluridine-3'-phosphate
  modified_base 23: mod_base = OTHER; note = 2'-O-methyluridine
tccttcaatatttgcttgttgtt

SEQ ID NO: 5534 - RNA, 23 nt, synthetic construct
  source 1..23: mol_type = other RNA
  modified_base 1: mod_base = OTHER; note = 2'-O-methyluridine-3'-phosphate 5'phosphate
  modified_base 2: mod_base = OTHER; note = 2'-deoxy-2'-fluoroadenosine-3'-phosphate
  modified_base 3: mod_base = OTHER; note = 2'-O-methylcytidine-3'-phosphate
  modified_base 4: mod_base = OTHER; note = 2'-O-methylcytidine-3'-phosphate
  modified_base 5: mod_base = OTHER; note = 2'-O-methyluridine-3'-phosphate
  modified_base 6: mod_base = OTHER; note = 2'-deoxy-2'-fluorouridine-3'-phosphate
  modified_base 7: mod_base = OTHER; note = 2'-O-methylcytidine-3'-phosphate
  modified_base 8: mod_base = OTHER; note = 2'-O-methyladenosine-3'-phosphate
  modified_base 9: mod_base = OTHER; note = 2'-O-methyladenosine-3'-phosphate
  modified_base 10: mod_base = OTHER; note = 2'-O-methyluridine-3'-phosphate
  modified_base 11: mod_base = OTHER; note = 2'-O-methyladenosine-3'-phosphate
  modified_base 12: mod_base = OTHER; note = 2'-O-methyluridine-3'-phosphate
  modified_base 13: mod_base = OTHER; note = 2'-O-methyluridine-3'-phosphate
  modified_base 14: mod_base = OTHER; note = 2'-deoxy-2'-fluorouridine-3'-phosphate
  modified_base 15: mod_base = OTHER; note = 2'-O-methylguanosine-3'-phosphate
  modified_base 16: mod_base = OTHER; note = 2'-deoxy-2'-fluorocytidine-3'-phosphate
  modified_base 17: mod_base = OTHER; note = 2'-O-methyluridine-3'-phosphate
  modified_base 18: mod_base = OTHER; note = 2'-O-methyluridine-3'-phosphate
  modified_base 19: mod_base = OTHER; note = 2'-O-methylguanosine-3'-phosphate
  modified_base 20: mod_base = OTHER; note = 2'-O-methyluridine-3'-phosphate
  modified_base 21: mod_base = OTHER; note = 2'-O-methyluridine-3'-phosphate
  modified_base 22: mod_base = OTHER; note = 2'-O-methylguanosine-3'-phosphate
  modified_base 23: mod_base = OTHER; note = 2'-O-methyluridine
taccttcaatatttgcttgttgt

SEQ ID NO: 5535 - RNA, 23 nt, synthetic construct
  source 1..23: mol_type = other RNA
  modified_base 1: mod_base = OTHER; note = 2'-O-methyluridine-3'-phosphate 5'phosphate
  modified_base 2: mod_base = OTHER; note = 2'-deoxy-2'-fluorocytidine-3'-phosphate
  modified_base 3: mod_base = OTHER; note = 2'-O-methyladenosine-3'-phosphate
  modified_base 4: mod_base = OTHER; note = 2'-O-methylcytidine-3'-phosphate
  modified_base 5: mod_base = OTHER; note = 2'-O-methylcytidine-3'-phosphate
  modified_base 6: mod_base = OTHER; note = 2'-deoxy-2'-fluorouridine-3'-phosphate
  modified_base 7: mod_base = OTHER; note = 2'-O-methyluridine-3'-phosphate
  modified_base 8: mod_base = OTHER; note = 2'-O-methylcytidine-3'-phosphate
  modified_base 9: mod_base = OTHER; note = 2'-O-methyladenosine-3'-phosphate
  modified_base 10: mod_base = OTHER; note = 2'-O-methyladenosine-3'-phosphate
  modified_base 11: mod_base = OTHER; note = 2'-O-methyluridine-3'-phosphate
  modified_base 12: mod_base = OTHER; note = 2'-O-methyladenosine-3'-phosphate
  modified_base 13: mod_base = OTHER; note = 2'-O-methyluridine-3'-phosphate
  modified_base 14: mod_base = OTHER; note = 2'-deoxy-2'-fluorouridine-3'-phosphate
  modified_base 15: mod_base = OTHER; note = 2'-O-methyluridine-3'-phosphate
  modified_base 16: mod_base = OTHER; note = 2'-deoxy-2'-fluoroguanosine-3'-phosphate
  modified_base 17: mod_base = OTHER; note = 2'-O-methylcytidine-3'-phosphate
  modified_base 18: mod_base = OTHER; note = 2'-O-methyluridine-3'-phosphate
  modified_base 19: mod_base = OTHER; note = 2'-O-methyluridine-3'-phosphate
  modified_base 20: mod_base = OTHER; note = 2'-O-methylguanosine-3'-phosphate
  modified_base 21: mod_base = OTHER; note = 2'-O-methyluridine-3'-phosphate
  modified_base 22: mod_base = OTHER; note = 2'-O-methyluridine-3'-phosphate
  modified_base 23: mod_base = OTHER; note = 2'-O-methylguanosine
tcaccttcaatatttgcttgttg

SEQ ID NO: 5536 - RNA, 23 nt, synthetic construct
  source 1..23: mol_type = other RNA
  modified_base 1: mod_base = OTHER; note = 2'-O-methyluridine-3'-phosphate 5'phosphate
  modified_base 2: mod_base = OTHER; note = 2'-deoxy-2'-fluorouridine-3'-phosphate
  modified_base 3: mod_base = OTHER; note = 2'-O-methyluridine-3'-phosphate
  modified_base 4: mod_base = OTHER; note = 2'-O-methyladenosine-3'-phosphate
  modified_base 5: mod_base = OTHER; note = 2'-O-methylguanosine-3'-phosphate
  modified_base 6: mod_base = OTHER; note = 2'-deoxy-2'-fluorocytidine-3'-phosphate
  modified_base 7: mod_base = OTHER; note = 2'-O-methyladenosine-3'-phosphate
  modified_base 8: mod_base = OTHER; note = 2'-O-methyladenosine-3'-phosphate
  modified_base 9: mod_base = OTHER; note = 2'-O-methyluridine-3'-phosphate
  modified_base 10: mod_base = OTHER; note = 2'-O-methylguanosine-3'-phosphate
  modified_base 11: mod_base = OTHER; note = 2'-O-methylguanosine-3'-phosphate
  modified_base 12: mod_base = OTHER; note = 2'-O-methylguanosine-3'-phosphate
  modified_base 13: mod_base = OTHER; note = 2'-O-methyladenosine-3'-phosphate
  modified_base 14: mod_base = OTHER; note = 2'-deoxy-2'-fluoroadenosine-3'-phosphate
  modified_base 15: mod_base = OTHER; note = 2'-O-methyladenosine-3'-phosphate
  modified_base 16: mod_base = OTHER; note = 2'-deoxy-2'-fluorouridine-3'-phosphate
  modified_base 17: mod_base = OTHER; note = 2'-O-methyladenosine-3'-phosphate
  modified_base 18: mod_base = OTHER; note = 2'-O-methyladenosine-3'-phosphate
  modified_base 19: mod_base = OTHER; note = 2'-O-methylguanosine-3'-phosphate
  modified_base 20: mod_base = OTHER; note = 2'-O-methyluridine-3'-phosphate
  modified_base 21: mod_base = OTHER; note = 2'-O-methylguanosine-3'-phosphate
  modified_base 22: mod_base = OTHER; note = 2'-O-methylguanosine-3'-phosphate
  modified_base 23: mod_base = OTHER; note = 2'-O-methyluridine
tttagcaatgggaaataagtggt

SEQ ID NO: 5537 - RNA, 23 nt, synthetic construct
  source 1..23: mol_type = other RNA
  modified_base 1: mod_base = OTHER; note = 2'-O-methyluridine-3'-phosphate 5'phosphate
  modified_base 2: mod_base = OTHER; note = 2'-deoxy-2'-fluoroadenosine-3'-phosphate
  modified_base 3: mod_base = OTHER; note = 2'-O-methyluridine-3'-phosphate
  modified_base 4: mod_base = OTHER; note = 2'-O-methyluridine-3'-phosphate
  modified_base 5: mod_base = OTHER; note = 2'-O-methyladenosine-3'-phosphate
  modified_base 6: mod_base = OTHER; note = 2'-deoxy-2'-fluoroguanosine-3'-phosphate
  modified_base 7: mod_base = OTHER; note = 2'-O-methylcytidine-3'-phosphate
  modified_base 8: mod_base = OTHER; note = 2'-O-methyladenosine-3'-phosphate
  modified_base 9: mod_base = OTHER; note = 2'-O-methyladenosine-3'-phosphate
  modified_base 10: mod_base = OTHER; note = 2'-O-methyluridine-3'-phosphate
  modified_base 11: mod_base = OTHER; note = 2'-O-methylguanosine-3'-phosphate
  modified_base 12: mod_base = OTHER; note = 2'-O-methylguanosine-3'-phosphate
  modified_base 13: mod_base = OTHER; note = 2'-O-methylguanosine-3'-phosphate
  modified_base 14: mod_base = OTHER; note = 2'-deoxy-2'-fluoroadenosine-3'-phosphate
  modified_base 15: mod_base = OTHER; note = 2'-O-methyladenosine-3'-phosphate
  modified_base 16: mod_base = OTHER; note = 2'-deoxy-2'-fluoroadenosine-3'-phosphate
  modified_base 17: mod_base = OTHER; note = 2'-O-methyluridine-3'-phosphate
  modified_base 18: mod_base = OTHER; note = 2'-O-methyladenosine-3'-phosphate
  modified_base 19: mod_base = OTHER; note = 2'-O-methyladenosine-3'-phosphate
  modified_base 20: mod_base = OTHER; note = 2'-O-methylguanosine-3'-phosphate
  modified_base 21: mod_base = OTHER; note = 2'-O-methyluridine-3'-phosphate
  modified_base 22: mod_base = OTHER; note = 2'-O-methylguanosine-3'-phosphate
  modified_base 23: mod_base = OTHER; note = 2'-O-methylguanosine
tattagcaatgggaaataagtgg

SEQ ID NO: 5538 - RNA, 23 nt, synthetic construct
  source 1..23: mol_type = other RNA
  modified_base 1: mod_base = OTHER; note = 2'-O-methyluridine-3'-phosphate 5'phosphate
  modified_base 2: mod_base = OTHER; note = 2'-deoxy-2'-fluoroadenosine-3'-phosphate
  modified_base 3: mod_base = OTHER; note = 2'-O-methyladenosine-3'-phosphate
  modified_base 4: mod_base = OTHER; note = 2'-O-methyluridine-3'-phosphate
  modified_base 5: mod_base = OTHER; note = 2'-O-methyluridine-3'-phosphate
  modified_base 6: mod_base = OTHER; note = 2'-deoxy-2'-fluoroadenosine-3'-phosphate
  modified_base 7: mod_base = OTHER; note = 2'-O-methylguanosine-3'-phosphate
  modified_base 8: mod_base = OTHER; note = 2'-O-methylcytidine-3'-phosphate
  modified_base 9: mod_base = OTHER; note = 2'-O-methyladenosine-3'-phosphate
  modified_base 10: mod_base = OTHER; note = 2'-O-methyladenosine-3'-phosphate
  modified_base 11: mod_base = OTHER; note = 2'-O-methyluridine-3'-phosphate
  modified_base 12: mod_base = OTHER; note = 2'-O-methylguanosine-3'-phosphate
  modified_base 13: mod_base = OTHER; note = 2'-O-methylguanosine-3'-phosphate
  modified_base 14: mod_base = OTHER; note = 2'-deoxy-2'-fluoroguanosine-3'-phosphate
  modified_base 15: mod_base = OTHER; note = 2'-O-methyladenosine-3'-phosphate
  modified_base 16: mod_base = OTHER; note = 2'-deoxy-2'-fluoroadenosine-3'-phosphate
  modified_base 17: mod_base = OTHER; note = 2'-O-methyladenosine-3'-phosphate
  modified_base 18: mod_base = OTHER; note = 2'-O-methyluridine-3'-phosphate
  modified_base 19: mod_base = OTHER; note = 2'-O-methyladenosine-3'-phosphate
  modified_base 20: mod_base = OTHER; note = 2'-O-methyladenosine-3'-phosphate
  modified_base 21: mod_base = OTHER; note = 2'-O-methylguanosine-3'-phosphate
  modified_base 22: mod_base = OTHER; note = 2'-O-methyluridine-3'-phosphate
  modified_base 23: mod_base = OTHER; note = 2'-O-methylguanosine
taattagcaatgggaaataagtg

SEQ ID NO: 5539 - RNA, 23 nt, synthetic construct
  source 1..23: mol_type = other RNA
  modified_base 1: mod_base = OTHER; note = 2'-O-methyluridine-3'-phosphate 5'phosphate
  modified_base 2: mod_base = OTHER; note = 2'-deoxy-2'-fluorocytidine-3'-phosphate
  modified_base 3: mod_base = OTHER; note = 2'-O-methyladenosine-3'-phosphate
  modified_base 4: mod_base = OTHER; note = 2'-O-methyladenosine-3'-phosphate
  modified_base 5: mod_base = OTHER; note = 2'-O-methyluridine-3'-phosphate
  modified_base 6: mod_base = OTHER; note = 2'-deoxy-2'-fluorouridine-3'-phosphate
  modified_base 7: mod_base = OTHER; note = 2'-O-methyladenosine-3'-phosphate
  modified_base 8: mod_base = OTHER; note = 2'-O-methylguanosine-3'-phosphate
  modified_base 9: mod_base = OTHER; note = 2'-O-methylcytidine-3'-phosphate
  modified_base 10: mod_base = OTHER; note = 2'-O-methyladenosine-3'-phosphate
  modified_base 11: mod_base = OTHER; note = 2'-O-methyladenosine-3'-phosphate
  modified_base 12: mod_base = OTHER; note = 2'-O-methyluridine-3'-phosphate
  modified_base 13: mod_base = OTHER; note = 2'-O-methylguanosine-3'-phosphate
  modified_base 14: mod_base = OTHER; note = 2'-deoxy-2'-fluoroguanosine-3'-phosphate
  modified_base 15: mod_base = OTHER; note = 2'-O-methylguanosine-3'-phosphate
  modified_base 16: mod_base = OTHER; note = 2'-deoxy-2'-fluoroadenosine-3'-phosphate
  modified_base 17: mod_base = OTHER; note = 2'-O-methyladenosine-3'-phosphate
  modified_base 18: mod_base = OTHER; note = 2'-O-methyladenosine-3'-phosphate
  modified_base 19: mod_base = OTHER; note = 2'-O-methyluridine-3'-phosphate
  modified_base 20: mod_base = OTHER; note = 2'-O-methyladenosine-3'-phosphate
  modified_base 21: mod_base = OTHER; note = 2'-O-methyladenosine-3'-phosphate
  modified_base 22: mod_base = OTHER; note = 2'-O-methylguanosine-3'-phosphate
  modified_base 23: mod_base = OTHER; note = 2'-O-methyluridine
tcaattagcaatgggaaataagt

SEQ ID NO: 5540 - RNA, 23 nt, synthetic construct
  source 1..23: mol_type = other RNA
  modified_base 1: mod_base = OTHER; note = 2'-O-methyluridine-3'-phosphate 5'phosphate
  modified_base 2: mod_base = OTHER; note = 2'-deoxy-2'-fluoroguanosine-3'-phosphate
  modified_base 3: mod_base = OTHER; note = 2'-O-methylguanosine-3'-phosphate
  modified_base 4: mod_base = OTHER; note = 2'-O-methylcytidine-3'-phosphate
  modified_base 5: mod_base = OTHER; note = 2'-O-methyladenosine-3'-phosphate
  modified_base 6: mod_base = OTHER; note = 2'-deoxy-2'-fluoroadenosine-3'-phosphate
  modified_base 7: mod_base = OTHER; note = 2'-O-methyluridine-3'-phosphate
  modified_base 8: mod_base = OTHER; note = 2'-O-methyluridine-3'-phosphate
  modified_base 9: mod_base = OTHER; note = 2'-O-methyladenosine-3'-phosphate
  modified_base 10: mod_base = OTHER; note = 2'-O-methylguanosine-3'-phosphate
  modified_base 11: mod_base = OTHER; note = 2'-O-methylcytidine-3'-phosphate
  modified_base 12: mod_base = OTHER; note = 2'-O-methyladenosine-3'-phosphate
  modified_base 13: mod_base = OTHER; note = 2'-O-methyladenosine-3'-phosphate
  modified_base 14: mod_base = OTHER; note = 2'-deoxy-2'-fluorouridine-3'-phosphate
  modified_base 15: mod_base = OTHER; note = 2'-O-methylguanosine-3'-phosphate
  modified_base 16: mod_base = OTHER; note = 2'-deoxy-2'-fluoroguanosine-3'-phosphate
  modified_base 17: mod_base = OTHER; note = 2'-O-methylguanosine-3'-phosphate
  modified_base 18: mod_base = OTHER; note = 2'-O-methyladenosine-3'-phosphate
  modified_base 19: mod_base = OTHER; note = 2'-O-methyladenosine-3'-phosphate
  modified_base 20: mod_base = OTHER; note = 2'-O-methyladenosine-3'-phosphate
  modified_base 21: mod_base = OTHER; note = 2'-O-methyluridine-3'-phosphate
  modified_base 22: mod_base = OTHER; note = 2'-O-methyladenosine-3'-phosphate
  modified_base 23: mod_base = OTHER; note = 2'-O-methyladenosine
tggcaattagcaatgggaaataa

SEQ ID NO: 5541 - RNA, 23 nt, synthetic construct
  source 1..23: mol_type = other RNA
  modified_base 1: mod_base = OTHER; note = 2'-O-methyluridine-3'-phosphate 5'phosphate
  modified_base 2: mod_base = OTHER; note = 2'-deoxy-2'-fluorouridine-3'-phosphate
  modified_base 3: mod_base = OTHER; note = 2'-O-methylguanosine-3'-phosphate
  modified_base 4: mod_base = OTHER; note = 2'-O-methyluridine-3'-phosphate
  modified_base 5: mod_base = OTHER; note = 2'-O-methyluridine-3'-phosphate
  modified_base 6: mod_base = OTHER; note = 2'-deoxy-2'-fluorouridine-3'-phosphate
  modified_base 7: mod_base = OTHER; note = 2'-O-methylcytidine-3'-phosphate
  modified_base 8: mod_base = OTHER; note = 2'-O-methyladenosine-3'-phosphate
  modified_base 9: mod_base = OTHER; note = 2'-O-methyladenosine-3'-phosphate
  modified_base 10: mod_base = OTHER; note = 2'-O-methyladenosine-3'-phosphate
  modified_base 11: mod_base = OTHER; note = 2'-O-methyladenosine-3'-phosphate
  modified_base 12: mod_base = OTHER; note = 2'-O-methylcytidine-3'-phosphate
  modified_base 13: mod_base = OTHER; note = 2'-O-methylcytidine-3'-phosphate
  modified_base 14: mod_base = OTHER; note = 2'-deoxy-2'-fluoroguanosine-3'-phosphate
  modified_base 15: mod_base = OTHER; note = 2'-O-methylguanosine-3'-phosphate
  modified_base 16: mod_base = OTHER; note = 2'-deoxy-2'-fluoroguanosine-3'-phosphate
  modified_base 17: mod_base = OTHER; note = 2'-O-methylcytidine-3'-phosphate
  modified_base 18: mod_base = OTHER; note = 2'-O-methyladenosine-3'-phosphate
  modified_base 19: mod_base = OTHER; note = 2'-O-methylguanosine-3'-phosphate
  modified_base 20: mod_base = OTHER; note = 2'-O-methylguanosine-3'-phosphate
  modified_base 21: mod_base = OTHER; note = 2'-O-methylcytidine-3'-phosphate
  modified_base 22: mod_base = OTHER; note = 2'-O-methyladenosine-3'-phosphate
  modified_base 23: mod_base = OTHER; note = 2'-O-methyladenosine
ttgtttcaaaaccgggcaggcaa

SEQ ID NO: 5542 - RNA, 23 nt, synthetic construct
  source 1..23: mol_type = other RNA
  modified_base 1: mod_base = OTHER; note = 2'-O-methyluridine-3'-phosphate 5'phosphate
  modified_base 2: mod_base = OTHER; note = 2'-deoxy-2'-fluorouridine-3'-phosphate
  modified_base 3: mod_base = OTHER; note = 2'-O-methyladenosine-3'-phosphate
  modified_base 4: mod_base = OTHER; note = 2'-O-methylcytidine-3'-phosphate
  modified_base 5: mod_base = OTHER; note = 2'-O-methyluridine-3'-phosphate
  modified_base 6: mod_base = OTHER; note = 2'-deoxy-2'-fluoroguanosine-3'-phosphate
  modified_base 7: mod_base = OTHER; note = 2'-O-methylcytidine-3'-phosphate
  modified_base 8: mod_base = OTHER; note = 2'-O-methyladenosine-3'-phosphate
  modified_base 9: mod_base = OTHER; note = 2'-O-methylguanosine-3'-phosphate
  modified_base 10: mod_base = OTHER; note = 2'-O-methyladenosine-3'-phosphate
  modified_base 11: mod_base = OTHER; note = 2'-O-methylcytidine-3'-phosphate
  modified_base 12: mod_base = OTHER; note = 2'-O-methyluridine-3'-phosphate
  modified_base 13: mod_base = OTHER; note = 2'-O-methylguanosine-3'-phosphate
  modified_base 14: mod_base = OTHER; note = 2'-deoxy-2'-fluorouridine-3'-phosphate
  modified_base 15: mod_base = OTHER; note = 2'-O-methyluridine-3'-phosphate
  modified_base 16: mod_base = OTHER; note = 2'-deoxy-2'-fluorouridine-3'-phosphate
  modified_base 17: mod_base = OTHER; note = 2'-O-methylcytidine-3'-phosphate
  modified_base 18: mod_base = OTHER; note = 2'-O-methyladenosine-3'-phosphate
  modified_base 19: mod_base = OTHER; note = 2'-O-methyladenosine-3'-phosphate
  modified_base 20: mod_base = OTHER; note = 2'-O-methyladenosine-3'-phosphate
  modified_base 21: mod_base = OTHER; note = 2'-O-methyladenosine-3'-phosphate
  modified_base 22: mod_base = OTHER; note = 2'-O-methylcytidine-3'-phosphate
  modified_base 23: mod_base = OTHER; note = 2'-O-methylcytidine
ttactgcagactgtttcaaaacc

SEQ ID NO: 5543 - RNA, 23 nt, synthetic construct
  source 1..23: mol_type = other RNA
  modified_base 1: mod_base = OTHER; note = 2'-O-methyluridine-3'-phosphate 5'phosphate
  modified_base 2: mod_base = OTHER; note = 2'-deoxy-2'-fluorouridine-3'-phosphate
  modified_base 3: mod_base = OTHER; note = 2'-O-methylguanosine-3'-phosphate
  modified_base 4: mod_base = OTHER; note = 2'-O-methyluridine-3'-phosphate
  modified_base 5: mod_base = OTHER; note = 2'-O-methyladenosine-3'-phosphate
  modified_base 6: mod_base = OTHER; note = 2'-deoxy-2'-fluorocytidine-3'-phosphate
  modified_base 7: mod_base = OTHER; note = 2'-O-methyluridine-3'-phosphate
  modified_base 8: mod_base = OTHER; note = 2'-O-methylguanosine-3'-phosphate
  modified_base 9: mod_base = OTHER; note = 2'-O-methylcytidine-3'-phosphate
  modified_base 10: mod_base = OTHER; note = 2'-O-methyladenosine-3'-phosphate
  modified_base 11: mod_base = OTHER; note = 2'-O-methylguanosine-3'-phosphate
  modified_base 12: mod_base = OTHER; note = 2'-O-methyladenosine-3'-phosphate
  modified_base 13: mod_base = OTHER; note = 2'-O-methylcytidine-3'-phosphate
  modified_base 14: mod_base = OTHER; note = 2'-deoxy-2'-fluorouridine-3'-phosphate
  modified_base 15: mod_base = OTHER; note = 2'-O-methylguanosine-3'-phosphate
  modified_base 16: mod_base = OTHER; note = 2'-deoxy-2'-fluorouridine-3'-phosphate
  modified_base 17: mod_base = OTHER; note = 2'-O-methyluridine-3'-phosphate
  modified_base 18: mod_base = OTHER; note = 2'-O-methyluridine-3'-phosphate
  modified_base 19: mod_base = OTHER; note = 2'-O-methylcytidine-3'-phosphate
  modified_base 20: mod_base = OTHER; note = 2'-O-methyladenosine-3'-phosphate
  modified_base 21: mod_base = OTHER; note = 2'-O-methyladenosine-3'-phosphate
  modified_base 22: mod_base = OTHER; note = 2'-O-methyladenosine-3'-phosphate
  modified_base 23: mod_base = OTHER; note = 2'-O-methyladenosine
ttgtactgcagactgtttcaaaa

SEQ ID NO: 5544 - RNA, 23 nt, synthetic construct
  source 1..23: mol_type = other RNA
  modified_base 1: mod_base = OTHER; note = 2'-O-methyluridine-3'-phosphate 5'phosphate
  modified_base 2: mod_base = OTHER; note = 2'-deoxy-2'-fluorouridine-3'-phosphate
  modified_base 3: mod_base = OTHER; note = 2'-O-methyladenosine-3'-phosphate
  modified_base 4: mod_base = OTHER; note = 2'-O-methyladenosine-3'-phosphate
  modified_base 5: mod_base = OTHER; note = 2'-O-methyladenosine-3'-phosphate
  modified_base 6: mod_base = OTHER; note = 2'-deoxy-2'-fluorocytidine-3'-phosphate
  modified_base 7: mod_base = OTHER; note = 2'-O-methyladenosine-3'-phosphate
  modified_base 8: mod_base = OTHER; note = 2'-O-methyluridine-3'-phosphate
  modified_base 9: mod_base = OTHER; note = 2'-O-methylguanosine-3'-phosphate
  modified_base 10: mod_base = OTHER; note = 2'-O-methyluridine-3'-phosphate
  modified_base 11: mod_base = OTHER; note = 2'-O-methyladenosine-3'-phosphate
  modified_base 12: mod_base = OTHER; note = 2'-O-methyluridine-3'-phosphate
  modified_base 13: mod_base = OTHER; note = 2'-O-methylcytidine-3'-phosphate
  modified_base 14: mod_base = OTHER; note = 2'-deoxy-2'-fluorouridine-3'-phosphate
  modified_base 15: mod_base = OTHER; note = 2'-O-methylcytidine-3'-phosphate
  modified_base 16: mod_base = OTHER; note = 2'-deoxy-2'-fluorouridine-3'-phosphate
  modified_base 17: mod_base = OTHER; note = 2'-O-methylcytidine-3'-phosphate
  modified_base 18: mod_base = OTHER; note = 2'-O-methylcytidine-3'-phosphate
  modified_base 19: mod_base = OTHER; note = 2'-O-methylcytidine-3'-phosphate
  modified_base 20: mod_base = OTHER; note = 2'-O-methyladenosine-3'-phosphate
  modified_base 21: mod_base = OTHER; note = 2'-O-methylcytidine-3'-phosphate
  modified_base 22: mod_base = OTHER; note = 2'-O-methyladenosine-3'-phosphate
  modified_base 23: mod_base = OTHER; note = 2'-O-methylguanosine
ttaaacatgtatctctcccacag

SEQ ID NO: 5545 - RNA, 23 nt, synthetic construct
  source 1..23: mol_type = other RNA
  modified_base 1: mod_base = OTHER; note = 2'-O-methyluridine-3'-phosphate 5'phosphate
  modified_base 2: mod_base = OTHER; note = 2'-deoxy-2'-fluorouridine-3'-phosphate
  modified_base 3: mod_base = OTHER; note = 2'-O-methylcytidine-3'-phosphate
  modified_base 4: mod_base = OTHER; note = 2'-O-methyluridine-3'-phosphate
  modified_base 5: mod_base = OTHER; note = 2'-O-methyladenosine-3'-phosphate
  modified_base 6: mod_base = OTHER; note = 2'-deoxy-2'-fluoroadenosine-3'-phosphate
  modified_base 7: mod_base = OTHER; note = 2'-O-methyladenosine-3'-phosphate
  modified_base 8: mod_base = OTHER; note = 2'-O-methylcytidine-3'-phosphate
  modified_base 9: mod_base = OTHER; note = 2'-O-methyladenosine-3'-phosphate
  modified_base 10: mod_base = OTHER; note = 2'-O-methyluridine-3'-phosphate
  modified_base 11: mod_base = OTHER; note = 2'-O-methylguanosine-3'-phosphate
  modified_base 12: mod_base = OTHER; note = 2'-O-methyluridine-3'-phosphate
  modified_base 13: mod_base = OTHER; note = 2'-O-methyladenosine-3'-phosphate
  modified_base 14: mod_base = OTHER; note = 2'-deoxy-2'-fluorouridine-3'-phosphate
  modified_base 15: mod_base = OTHER; note = 2'-O-methylcytidine-3'-phosphate
  modified_base 16: mod_base = OTHER; note = 2'-deoxy-2'-fluorouridine-3'-phosphate
  modified_base 17: mod_base = OTHER; note = 2'-O-methylcytidine-3'-phosphate
  modified_base 18: mod_base = OTHER; note = 2'-O-methyluridine-3'-phosphate
  modified_base 19: mod_base = OTHER; note = 2'-O-methylcytidine-3'-phosphate
  modified_base 20: mod_base = OTHER; note = 2'-O-methylcytidine-3'-phosphate
  modified_base 21: mod_base = OTHER; note = 2'-O-methylcytidine-3'-phosphate
  modified_base 22: mod_base = OTHER; note = 2'-O-methyladenosine-3'-phosphate
  modified_base 23: mod_base = OTHER; note = 2'-O-methylcytidine
ttctaaacatgtatctctcccac

SEQ ID NO: 5546 - RNA, 23 nt, synthetic construct
  source 1..23: mol_type = other RNA
  modified_base 1: mod_base = OTHER; note = 2'-O-methyluridine-3'-phosphate 5'phosphate
  modified_base 2: mod_base = OTHER; note = 2'-deoxy-2'-fluorouridine-3'-phosphate
  modified_base 3: mod_base = OTHER; note = 2'-O-methyluridine-3'-phosphate
  modified_base 4: mod_base = OTHER; note = 2'-O-methylcytidine-3'-phosphate
  modified_base 5: mod_base = OTHER; note = 2'-O-methyluridine-3'-phosphate
  modified_base 6: mod_base = OTHER; note = 2'-deoxy-2'-fluoroadenosine-3'-phosphate
  modified_base 7: mod_base = OTHER; note = 2'-O-methyladenosine-3'-phosphate
  modified_base 8: mod_base = OTHER; note = 2'-O-methyladenosine-3'-phosphate
  modified_base 9: mod_base = OTHER; note = 2'-O-methylcytidine-3'-phosphate
  modified_base 10: mod_base = OTHER; note = 2'-O-methyladenosine-3'-phosphate
  modified_base 11: mod_base = OTHER; note = 2'-O-methyluridine-3'-phosphate
  modified_base 12: mod_base = OTHER; note = 2'-O-methylguanosine-3'-phosphate
  modified_base 13: mod_base = OTHER; note = 2'-O-methyluridine-3'-phosphate
  modified_base 14: mod_base = OTHER; note = 2'-deoxy-2'-fluoroadenosine-3'-phosphate
  modified_base 15: mod_base = OTHER; note = 2'-O-methyluridine-3'-phosphate
  modified_base 16: mod_base = OTHER; note = 2'-deoxy-2'-fluorocytidine-3'-phosphate
  modified_base 17: mod_base = OTHER; note = 2'-O-methyluridine-3'-phosphate
  modified_base 18: mod_base = OTHER; note = 2'-O-methylcytidine-3'-phosphate
  modified_base 19: mod_base = OTHER; note = 2'-O-methyluridine-3'-phosphate
  modified_base 20: mod_base = OTHER; note = 2'-O-methylcytidine-3'-phosphate
  modified_base 21: mod_base = OTHER; note = 2'-O-methylcytidine-3'-phosphate
  modified_base 22: mod_base = OTHER; note = 2'-O-methylcytidine-3'-phosphate
  modified_base 23: mod_base = OTHER; note = 2'-O-methyladenosine
tttctaaacatgtatctctccca

SEQ ID NO: 5547 - RNA, 23 nt, synthetic construct
  source 1..23: mol_type = other RNA
  modified_base 1: mod_base = OTHER; note = 2'-O-methyluridine-3'-phosphate 5'phosphate
  modified_base 2: mod_base = OTHER; note = 2'-deoxy-2'-fluorocytidine-3'-phosphate
  modified_base 3: mod_base = OTHER; note = 2'-O-methyluridine-3'-phosphate
  modified_base 4: mod_base = OTHER; note = 2'-O-methyluridine-3'-phosphate
  modified_base 5: mod_base = OTHER; note = 2'-O-methylcytidine-3'-phosphate
  modified_base 6: mod_base = OTHER; note = 2'-deoxy-2'-fluorouridine-3'-phosphate
  modified_base 7: mod_base = OTHER; note = 2'-O-methyladenosine-3'-phosphate
  modified_base 8: mod_base = OTHER; note = 2'-O-methyladenosine-3'-phosphate
  modified_base 9: mod_base = OTHER; note = 2'-O-methyladenosine-3'-phosphate
  modified_base 10: mod_base = OTHER; note = 2'-O-methylcytidine-3'-phosphate
  modified_base 11: mod_base = OTHER; note = 2'-O-methyladenosine-3'-phosphate
  modified_base 12: mod_base = OTHER; note = 2'-O-methyluridine-3'-phosphate
  modified_base 13: mod_base = OTHER; note = 2'-O-methylguanosine-3'-phosphate
  modified_base 14: mod_base = OTHER; note = 2'-deoxy-2'-fluorouridine-3'-phosphate
  modified_base 15: mod_base = OTHER; note = 2'-O-methyladenosine-3'-phosphate
  modified_base 16: mod_base = OTHER; note = 2'-deoxy-2'-fluorouridine-3'-phosphate
  modified_base 17: mod_base = OTHER; note = 2'-O-methylcytidine-3'-phosphate
  modified_base 18: mod_base = OTHER; note = 2'-O-methyluridine-3'-phosphate
  modified_base 19: mod_base = OTHER; note = 2'-O-methylcytidine-3'-phosphate
  modified_base 20: mod_base = OTHER; note = 2'-O-methyluridine-3'-phosphate
  modified_base 21: mod_base = OTHER; note = 2'-O-methylcytidine-3'-phosphate
  modified_base 22: mod_base = OTHER; note = 2'-O-methylcytidine-3'-phosphate
  modified_base 23: mod_base = OTHER; note = 2'-O-methylcytidine
tcttctaaacatgtatctctccc

SEQ ID NO: 5548 - RNA, 23 nt, synthetic construct
  source 1..23: mol_type = other RNA
  modified_base 1: mod_base = OTHER; note = 2'-O-methyluridine-3'-phosphate 5'phosphate
  modified_base 2: mod_base = OTHER; note = 2'-deoxy-2'-fluorouridine-3'-phosphate
  modified_base 3: mod_base = OTHER; note = 2'-O-methylcytidine-3'-phosphate
  modified_base 4: mod_base = OTHER; note = 2'-O-methylcytidine-3'-phosphate
  modified_base 5: mod_base = OTHER; note = 2'-O-methyluridine-3'-phosphate
  modified_base 6: mod_base = OTHER; note = 2'-deoxy-2'-fluorouridine-3'-phosphate
  modified_base 7: mod_base = OTHER; note = 2'-O-methylcytidine-3'-phosphate
  modified_base 8: mod_base = OTHER; note = 2'-O-methyluridine-3'-phosphate
  modified_base 9: mod_base = OTHER; note = 2'-O-methyladenosine-3'-phosphate
  modified_base 10: mod_base = OTHER; note = 2'-O-methyladenosine-3'-phosphate
  modified_base 11: mod_base = OTHER; note = 2'-O-methyladenosine-3'-phosphate
  modified_base 12: mod_base = OTHER; note = 2'-O-methylcytidine-3'-phosphate
  modified_base 13: mod_base = OTHER; note = 2'-O-methyladenosine-3'-phosphate
  modified_base 14: mod_base = OTHER; note = 2'-deoxy-2'-fluorouridine-3'-phosphate
  modified_base 15: mod_base = OTHER; note = 2'-O-methylguanosine-3'-phosphate
  modified_base 16: mod_base = OTHER; note = 2'-deoxy-2'-fluorouridine-3'-phosphate
  modified_base 17: mod_base = OTHER; note = 2'-O-methyladenosine-3'-phosphate
  modified_base 18: mod_base = OTHER; note = 2'-O-methyluridine-3'-phosphate
  modified_base 19: mod_base = OTHER; note = 2'-O-methylcytidine-3'-phosphate
  modified_base 20: mod_base = OTHER; note = 2'-O-methyluridine-3'-phosphate
  modified_base 21: mod_base = OTHER; note = 2'-O-methylcytidine-3'-phosphate
  modified_base 22: mod_base = OTHER; note = 2'-O-methyluridine-3'-phosphate
  modified_base 23: mod_base = OTHER; note = 2'-O-methylcytidine
ttccttctaaacatgtatctctc

SEQ ID NO: 5549 - RNA, 23 nt, synthetic construct
  source 1..23: mol_type = other RNA
  modified_base 1: mod_base = OTHER; note = 2'-O-methyluridine-3'-phosphate 5'phosphate
  modified_base 2: mod_base = OTHER; note = 2'-deoxy-2'-fluorouridine-3'-phosphate
  modified_base 3: mod_base = OTHER; note = 2'-O-methyluridine-3'-phosphate
  modified_base 4: mod_base = OTHER; note = 2'-O-methylcytidine-3'-phosphate
  modified_base 5: mod_base = OTHER; note = 2'-O-methylcytidine-3'-phosphate
  modified_base 6: mod_base = OTHER; note = 2'-deoxy-2'-fluorouridine-3'-phosphate
  modified_base 7: mod_base = OTHER; note = 2'-O-methyluridine-3'-phosphate
  modified_base 8: mod_base = OTHER; note = 2'-O-methylcytidine-3'-phosphate
  modified_base 9: mod_base = OTHER; note = 2'-O-methyluridine-3'-phosphate
  modified_base 10: mod_base = OTHER; note = 2'-O-methyladenosine-3'-phosphate
  modified_base 11: mod_base = OTHER; note = 2'-O-methyladenosine-3'-phosphate
  modified_base 12: mod_base = OTHER; note = 2'-O-methyladenosine-3'-phosphate
  modified_base 13: mod_base = OTHER; note = 2'-O-methylcytidine-3'-phosphate
  modified_base 14: mod_base = OTHER; note = 2'-deoxy-2'-fluoroadenosine-3'-phosphate
  modified_base 15: mod_base = OTHER; note = 2'-O-methyluridine-3'-phosphate
  modified_base 16: mod_base = OTHER; note = 2'-deoxy-2'-fluoroguanosine-3'-phosphate
  modified_base 17: mod_base = OTHER; note = 2'-O-methyluridine-3'-phosphate
  modified_base 18: mod_base = OTHER; note = 2'-O-methyladenosine-3'-phosphate
  modified_base 19: mod_base = OTHER; note = 2'-O-methyluridine-3'-phosphate
  modified_base 20: mod_base = OTHER; note = 2'-O-methylcytidine-3'-phosphate
  modified_base 21: mod_base = OTHER; note = 2'-O-methyluridine-3'-phosphate
  modified_base 22: mod_base = OTHER; note = 2'-O-methylcytidine-3'-phosphate
  modified_base 23: mod_base = OTHER; note = 2'-O-methyluridine
tttccttctaaacatgtatctct

SEQ ID NO: 5550 - RNA, 23 nt, synthetic construct
  source 1..23: mol_type = other RNA
  modified_base 1: mod_base = OTHER; note = 2'-O-methyluridine-3'-phosphate 5'phosphate
  modified_base 2: mod_base = OTHER; note = 2'-deoxy-2'-fluorocytidine-3'-phosphate
  modified_base 3: mod_base = OTHER; note = 2'-O-methyluridine-3'-phosphate
  modified_base 4: mod_base = OTHER; note = 2'-O-methyluridine-3'-phosphate
  modified_base 5: mod_base = OTHER; note = 2'-O-methylcytidine-3'-phosphate
  modified_base 6: mod_base = OTHER; note = 2'-deoxy-2'-fluorocytidine-3'-phosphate
  modified_base 7: mod_base = OTHER; note = 2'-O-methyluridine-3'-phosphate
  modified_base 8: mod_base = OTHER; note = 2'-O-methyluridine-3'-phosphate
  modified_base 9: mod_base = OTHER; note = 2'-O-methylcytidine-3'-phosphate
  modified_base 10: mod_base = OTHER; note = 2'-O-methyluridine-3'-phosphate
  modified_base 11: mod_base = OTHER; note = 2'-O-methyladenosine-3'-phosphate
  modified_base 12: mod_base = OTHER; note = 2'-O-methyladenosine-3'-phosphate
  modified_base 13: mod_base = OTHER; note = 2'-O-methyladenosine-3'-phosphate
  modified_base 14: mod_base = OTHER; note = 2'-deoxy-2'-fluorocytidine-3'-phosphate
  modified_base 15: mod_base = OTHER; note = 2'-O-methyladenosine-3'-phosphate
  modified_base 16: mod_base = OTHER; note = 2'-deoxy-2'-fluorouridine-3'-phosphate
  modified_base 17: mod_base = OTHER; note = 2'-O-methylguanosine-3'-phosphate
  modified_base 18: mod_base = OTHER; note = 2'-O-methyluridine-3'-phosphate
  modified_base 19: mod_base = OTHER; note = 2'-O-methyladenosine-3'-phosphate
  modified_base 20: mod_base = OTHER; note = 2'-O-methyluridine-3'-phosphate
  modified_base 21: mod_base = OTHER; note = 2'-O-methylcytidine-3'-phosphate
  modified_base 22: mod_base = OTHER; note = 2'-O-methyluridine-3'-phosphate
  modified_base 23: mod_base = OTHER; note = 2'-O-methylcytidine
tcttccttctaaacatgtatctc

SEQ ID NO: 5551 - RNA, 23 nt, synthetic construct
  source 1..23: mol_type = other RNA
  modified_base 1: mod_base = OTHER; note = 2'-O-methyluridine-3'-phosphate 5'phosphate
  modified_base 2: mod_base = OTHER; note = 2'-deoxy-2'-fluorouridine-3'-phosphate
  modified_base 3: mod_base = OTHER; note = 2'-O-methylcytidine-3'-phosphate
  modified_base 4: mod_base = OTHER; note = 2'-O-methyluridine-3'-phosphate
  modified_base 5: mod_base = OTHER; note = 2'-O-methyluridine-3'-phosphate
  modified_base 6: mod_base = OTHER; note = 2'-deoxy-2'-fluorocytidine-3'-phosphate
  modified_base 7: mod_base = OTHER; note = 2'-O-methylcytidine-3'-phosphate
  modified_base 8: mod_base = OTHER; note = 2'-O-methyluridine-3'-phosphate
  modified_base 9: mod_base = OTHER; note = 2'-O-methyluridine-3'-phosphate
  modified_base 10: mod_base = OTHER; note = 2'-O-methylcytidine-3'-phosphate
  modified_base 11: mod_base = OTHER; note = 2'-O-methyluridine-3'-phosphate
  modified_base 12: mod_base = OTHER; note = 2'-O-methyladenosine-3'-phosphate
  modified_base 13: mod_base = OTHER; note = 2'-O-methyladenosine-3'-phosphate
  modified_base 14: mod_base = OTHER; note = 2'-deoxy-2'-fluoroadenosine-3'-phosphate
  modified_base 15: mod_base = OTHER; note = 2'-O-methylcytidine-3'-phosphate
  modified_base 16: mod_base = OTHER; note = 2'-deoxy-2'-fluoroadenosine-3'-phosphate
  modified_base 17: mod_base = OTHER; note = 2'-O-methyluridine-3'-phosphate
  modified_base 18: mod_base = OTHER; note = 2'-O-methylguanosine-3'-phosphate
  modified_base 19: mod_base = OTHER; note = 2'-O-methyluridine-3'-phosphate
  modified_base 20: mod_base = OTHER; note = 2'-O-methyladenosine-3'-phosphate
  modified_base 21: mod_base = OTHER; note = 2'-O-methyluridine-3'-phosphate
  modified_base 22: mod_base = OTHER; note = 2'-O-methylcytidine-3'-phosphate
  modified_base 23: mod_base = OTHER; note = 2'-O-methyluridine
ttcttccttctaaacatgtatct

SEQ ID NO: 5552 - RNA, 23 nt, synthetic construct
  source 1..23: mol_type = other RNA
  modified_base 1: mod_base = OTHER; note = 2'-O-methyluridine-3'-phosphate 5'phosphate
  modified_base 2: mod_base = OTHER; note = 2'-deoxy-2'-fluorouridine-3'-phosphate
  modified_base 3: mod_base = OTHER; note = 2'-O-methyluridine-3'-phosphate
  modified_base 4: mod_base = OTHER; note = 2'-O-methylcytidine-3'-phosphate
  modified_base 5: mod_base = OTHER; note = 2'-O-methyluridine-3'-phosphate
  modified_base 6: mod_base = OTHER; note = 2'-deoxy-2'-fluorocytidine-3'-phosphate
  modified_base 7: mod_base = OTHER; note = 2'-O-methyluridine-3'-phosphate
  modified_base 8: mod_base = OTHER; note = 2'-O-methyluridine-3'-phosphate
  modified_base 9: mod_base = OTHER; note = 2'-O-methylcytidine-3'-phosphate
  modified_base 10: mod_base = OTHER; note = 2'-O-methylcytidine-3'-phosphate
  modified_base 11: mod_base = OTHER; note = 2'-O-methyluridine-3'-phosphate
  modified_base 12: mod_base = OTHER; note = 2'-O-methyluridine-3'-phosphate
  modified_base 13: mod_base = OTHER; note = 2'-O-methylcytidine-3'-phosphate
  modified_base 14: mod_base = OTHER; note = 2'-deoxy-2'-fluorouridine-3'-phosphate
  modified_base 15: mod_base = OTHER; note = 2'-O-methyladenosine-3'-phosphate
  modified_base 16: mod_base = OTHER; note = 2'-deoxy-2'-fluoroadenosine-3'-phosphate
  modified_base 17: mod_base = OTHER; note = 2'-O-methyladenosine-3'-phosphate
  modified_base 18: mod_base = OTHER; note = 2'-O-methylcytidine-3'-phosphate
  modified_base 19: mod_base = OTHER; note = 2'-O-methyladenosine-3'-phosphate
  modified_base 20: mod_base = OTHER; note = 2'-O-methyluridine-3'-phosphate
  modified_base 21: mod_base = OTHER; note = 2'-O-methylguanosine-3'-phosphate
  modified_base 22: mod_base = OTHER; note = 2'-O-methyluridine-3'-phosphate
  modified_base 23: mod_base = OTHER; note = 2'-O-methyladenosine
tttctcttccttctaaacatgta

SEQ ID NO: 5553 - RNA, 23 nt, synthetic construct
  source 1..23: mol_type = other RNA
  modified_base 1: mod_base = OTHER; note = 2'-O-methyluridine-3'-phosphate 5'phosphate
  modified_base 2: mod_base = OTHER; note = 2'-deoxy-2'-fluorocytidine-3'-phosphate
  modified_base 3: mod_base = OTHER; note = 2'-O-methyluridine-3'-phosphate
  modified_base 4: mod_base = OTHER; note = 2'-O-methyluridine-3'-phosphate
  modified_base 5: mod_base = OTHER; note = 2'-O-methyluridine-3'-phosphate
  modified_base 6: mod_base = OTHER; note = 2'-deoxy-2'-fluorocytidine-3'-phosphate
  modified_base 7: mod_base = OTHER; note = 2'-O-methyluridine-3'-phosphate
  modified_base 8: mod_base = OTHER; note = 2'-O-methylcytidine-3'-phosphate
  modified_base 9: mod_base = OTHER; note = 2'-O-methyluridine-3'-phosphate
  modified_base 10: mod_base = OTHER; note = 2'-O-methyluridine-3'-phosphate
  modified_base 11: mod_base = OTHER; note = 2'-O-methylcytidine-3'-phosphate
  modified_base 12: mod_base = OTHER; note = 2'-O-methylcytidine-3'-phosphate
  modified_base 13: mod_base = OTHER; note = 2'-O-methyluridine-3'-phosphate
  modified_base 14: mod_base = OTHER; note = 2'-deoxy-2'-fluorouridine-3'-phosphate
  modified_base 15: mod_base = OTHER; note = 2'-O-methylcytidine-3'-phosphate
  modified_base 16: mod_base = OTHER; note = 2'-deoxy-2'-fluorouridine-3'-phosphate
  modified_base 17: mod_base = OTHER; note = 2'-O-methyladenosine-3'-phosphate
  modified_base 18: mod_base = OTHER; note = 2'-O-methyladenosine-3'-phosphate
  modified_base 19: mod_base = OTHER; note = 2'-O-methyladenosine-3'-phosphate
  modified_base 20: mod_base = OTHER; note = 2'-O-methylcytidine-3'-phosphate
  modified_base 21: mod_base = OTHER; note = 2'-O-methyladenosine-3'-phosphate
  modified_base 22: mod_base = OTHER; note = 2'-O-methyluridine-3'-phosphate
  modified_base 23: mod_base = OTHER; note = 2'-O-methylguanosine
tctttctcttccttctaaacatg

SEQ ID NO: 5554 - RNA, 23 nt, synthetic construct
  source 1..23: mol_type = other RNA
  modified_base 1: mod_base = OTHER; note = 2'-O-methyluridine-3'-phosphate 5'phosphate
  modified_base 2: mod_base = OTHER; note = 2'-deoxy-2'-fluorocytidine-3'-phosphate
  modified_base 3: mod_base = OTHER; note = 2'-O-methylcytidine-3'-phosphate
  modified_base 4: mod_base = OTHER; note = 2'-O-methyluridine-3'-phosphate
  modified_base 5: mod_base = OTHER; note = 2'-O-methyluridine-3'-phosphate
  modified_base 6: mod_base = OTHER; note = 2'-deoxy-2'-fluorouridine-3'-phosphate
  modified_base 7: mod_base = OTHER; note = 2'-O-methylcytidine-3'-phosphate
  modified_base 8: mod_base = OTHER; note = 2'-O-methyluridine-3'-phosphate
  modified_base 9: mod_base = OTHER; note = 2'-O-methylcytidine-3'-phosphate
  modified_base 10: mod_base = OTHER; note = 2'-O-methyluridine-3'-phosphate
  modified_base 11: mod_base = OTHER; note = 2'-O-methyluridine-3'-phosphate
  modified_base 12: mod_base = OTHER; note = 2'-O-methylcytidine-3'-phosphate
  modified_base 13: mod_base = OTHER; note = 2'-O-methylcytidine-3'-phosphate
  modified_base 14: mod_base = OTHER; note = 2'-deoxy-2'-fluorouridine-3'-phosphate
  modified_base 15: mod_base = OTHER; note = 2'-O-methyluridine-3'-phosphate
  modified_base 16: mod_base = OTHER; note = 2'-deoxy-2'-fluorocytidine-3'-phosphate
  modified_base 17: mod_base = OTHER; note = 2'-O-methyluridine-3'-phosphate
  modified_base 18: mod_base = OTHER; note = 2'-O-methyladenosine-3'-phosphate
  modified_base 19: mod_base = OTHER; note = 2'-O-methyladenosine-3'-phosphate
  modified_base 20: mod_base = OTHER; note = 2'-O-methyladenosine-3'-phosphate
  modified_base 21: mod_base = OTHER; note = 2'-O-methylcytidine-3'-phosphate
  modified_base 22: mod_base = OTHER; note = 2'-O-methyladenosine-3'-phosphate
  modified_base 23: mod_base = OTHER; note = 2'-O-methyluridine
tcctttctcttccttctaaacat

SEQ ID NO: 5555 - RNA, 23 nt, synthetic construct
  source 1..23: mol_type = other RNA
  modified_base 1: mod_base = OTHER; note = 2'-O-methyluridine-3'-phosphate 5'phosphate
  modified_base 2: mod_base = OTHER; note = 2'-deoxy-2'-fluoroguanosine-3'-phosphate
  modified_base 3: mod_base = OTHER; note = 2'-O-methyluridine-3'-phosphate
  modified_base 4: mod_base = OTHER; note = 2'-O-methylcytidine-3'-phosphate
  modified_base 5: mod_base = OTHER; note = 2'-O-methylcytidine-3'-phosphate
  modified_base 6: mod_base = OTHER; note = 2'-deoxy-2'-fluorouridine-3'-phosphate
  modified_base 7: mod_base = OTHER; note = 2'-O-methyluridine-3'-phosphate
  modified_base 8: mod_base = OTHER; note = 2'-O-methyluridine-3'-phosphate
  modified_base 9: mod_base = OTHER; note = 2'-O-methylcytidine-3'-phosphate
  modified_base 10: mod_base = OTHER; note = 2'-O-methyluridine-3'-phosphate
  modified_base 11: mod_base = OTHER; note = 2'-O-methylcytidine-3'-phosphate
  modified_base 12: mod_base = OTHER; note = 2'-O-methyluridine-3'-phosphate
  modified_base 13: mod_base = OTHER; note = 2'-O-methyluridine-3'-phosphate
  modified_base 14: mod_base = OTHER; note = 2'-deoxy-2'-fluorocytidine-3'-phosphate
  modified_base 15: mod_base = OTHER; note = 2'-O-methylcytidine-3'-phosphate
  modified_base 16: mod_base = OTHER; note = 2'-deoxy-2'-fluorouridine-3'-phosphate
  modified_base 17: mod_base = OTHER; note = 2'-O-methyluridine-3'-phosphate
  modified_base 18: mod_base = OTHER; note = 2'-O-methylcytidine-3'-phosphate
  modified_base 19: mod_base = OTHER; note = 2'-O-methyluridine-3'-phosphate
  modified_base 20: mod_base = OTHER; note = 2'-O-methyladenosine-3'-phosphate
  modified_base 21: mod_base = OTHER; note = 2'-O-methyladenosine-3'-phosphate
  modified_base 22: mod_base = OTHER; note = 2'-O-methyladenosine-3'-phosphate
  modified_base 23: mod_base = OTHER; note = 2'-O-methylcytidine
tgtcctttctcttccttctaaac

SEQ ID NO: 5556 - RNA, 23 nt, synthetic construct
  source 1..23: mol_type = other RNA
  modified_base 1: mod_base = OTHER; note = 2'-O-methyluridine-3'-phosphate 5'phosphate
  modified_base 2: mod_base = OTHER; note = 2'-deoxy-2'-fluorouridine-3'-phosphate
  modified_base 3: mod_base = OTHER; note = 2'-O-methylguanosine-3'-phosphate
  modified_base 4: mod_base = OTHER; note = 2'-O-methyluridine-3'-phosphate
  modified_base 5: mod_base = OTHER; note = 2'-O-methylcytidine-3'-phosphate
  modified_base 6: mod_base = OTHER; note = 2'-deoxy-2'-fluorocytidine-3'-phosphate
  modified_base 7: mod_base = OTHER; note = 2'-O-methyluridine-3'-phosphate
  modified_base 8: mod_base = OTHER; note = 2'-O-methyluridine-3'-phosphate
  modified_base 9: mod_base = OTHER; note = 2'-O-methyluridine-3'-phosphate
  modified_base 10: mod_base = OTHER; note = 2'-O-methylcytidine-3'-phosphate
  modified_base 11: mod_base = OTHER; note = 2'-O-methyluridine-3'-phosphate
  modified_base 12: mod_base = OTHER; note = 2'-O-methylcytidine-3'-phosphate
  modified_base 13: mod_base = OTHER; note = 2'-O-methyluridine-3'-phosphate
  modified_base 14: mod_base = OTHER; note = 2'-deoxy-2'-fluorouridine-3'-phosphate
  modified_base 15: mod_base = OTHER; note = 2'-O-methylcytidine-3'-phosphate
  modified_base 16: mod_base = OTHER; note = 2'-deoxy-2'-fluorocytidine-3'-phosphate
  modified_base 17: mod_base = OTHER; note = 2'-O-methyluridine-3'-phosphate
  modified_base 18: mod_base = OTHER; note = 2'-O-methyluridine-3'-phosphate
  modified_base 19: mod_base = OTHER; note = 2'-O-methylcytidine-3'-phosphate
  modified_base 20: mod_base = OTHER; note = 2'-O-methyluridine-3'-phosphate
  modified_base 21: mod_base = OTHER; note = 2'-O-methyladenosine-3'-phosphate
  modified_base 22: mod_base = OTHER; note = 2'-O-methyladenosine-3'-phosphate
  modified_base 23: mod_base = OTHER; note = 2'-O-methyladenosine
ttgtcctttctcttccttctaaa

SEQ ID NO: 5557 - RNA, 23 nt, synthetic construct
  source 1..23: mol_type = other RNA
  modified_base 1: mod_base = OTHER; note = 2'-O-methyluridine-3'-phosphate 5'phosphate
  modified_base 2: mod_base = OTHER; note = 2'-deoxy-2'-fluorouridine-3'-phosphate
  modified_base 3: mod_base = OTHER; note = 2'-O-methyluridine-3'-phosphate
  modified_base 4: mod_base = OTHER; note = 2'-O-methylguanosine-3'-phosphate
  modified_base 5: mod_base = OTHER; note = 2'-O-methyluridine-3'-phosphate
  modified_base 6: mod_base = OTHER; note = 2'-deoxy-2'-fluorocytidine-3'-phosphate
  modified_base 7: mod_base = OTHER; note = 2'-O-methylcytidine-3'-phosphate
  modified_base 8: mod_base = OTHER; note = 2'-O-methyluridine-3'-phosphate
  modified_base 9: mod_base = OTHER; note = 2'-O-methyluridine-3'-phosphate
  modified_base 10: mod_base = OTHER; note = 2'-O-methyluridine-3'-phosphate
  modified_base 11: mod_base = OTHER; note = 2'-O-methylcytidine-3'-phosphate
  modified_base 12: mod_base = OTHER; note = 2'-O-methyluridine-3'-phosphate
  modified_base 13: mod_base = OTHER; note = 2'-O-methylcytidine-3'-phosphate
  modified_base 14: mod_base = OTHER; note = 2'-deoxy-2'-fluorouridine-3'-phosphate
  modified_base 15: mod_base = OTHER; note = 2'-O-methyluridine-3'-phosphate
  modified_base 16: mod_base = OTHER; note = 2'-deoxy-2'-fluorocytidine-3'-phosphate
  modified_base 17: mod_base = OTHER; note = 2'-O-methylcytidine-3'-phosphate
  modified_base 18: mod_base = OTHER; note = 2'-O-methyluridine-3'-phosphate
  modified_base 19: mod_base = OTHER; note = 2'-O-methyluridine-3'-phosphate
  modified_base 20: mod_base = OTHER; note = 2'-O-methylcytidine-3'-phosphate
  modified_base 21: mod_base = OTHER; note = 2'-O-methyluridine-3'-phosphate
  modified_base 22: mod_base = OTHER; note = 2'-O-methyladenosine-3'-phosphate
  modified_base 23: mod_base = OTHER; note = 2'-O-methyladenosine
tttgtcctttctcttccttctaa

SEQ ID NO: 5558 - RNA, 23 nt, synthetic construct
  source 1..23: mol_type = other RNA
  modified_base 1: mod_base = OTHER; note = 2'-O-methyluridine-3'-phosphate 5'phosphate
  modified_base 2: mod_base = OTHER; note = 2'-deoxy-2'-fluorouridine-3'-phosphate
  modified_base 3: mod_base = OTHER; note = 2'-O-methyluridine-3'-phosphate
  modified_base 4: mod_base = OTHER; note = 2'-O-methyluridine-3'-phosphate
  modified_base 5: mod_base = OTHER; note = 2'-O-methylguanosine-3'-phosphate
  modified_base 6: mod_base = OTHER; note = 2'-deoxy-2'-fluorouridine-3'-phosphate
  modified_base 7: mod_base = OTHER; note = 2'-O-methylcytidine-3'-phosphate
  modified_base 8: mod_base = OTHER; note = 2'-O-methylcytidine-3'-phosphate
  modified_base 9: mod_base = OTHER; note = 2'-O-methyluridine-3'-phosphate
  modified_base 10: mod_base = OTHER; note = 2'-O-methyluridine-3'-phosphate
  modified_base 11: mod_base = OTHER; note = 2'-O-methyluridine-3'-phosphate
  modified_base 12: mod_base = OTHER; note = 2'-O-methylcytidine-3'-phosphate
  modified_base 13: mod_base = OTHER; note = 2'-O-methyluridine-3'-phosphate
  modified_base 14: mod_base = OTHER; note = 2'-deoxy-2'-fluorocytidine-3'-phosphate
  modified_base 15: mod_base = OTHER; note = 2'-O-methyluridine-3'-phosphate
  modified_base 16: mod_base = OTHER; note = 2'-deoxy-2'-fluorouridine-3'-phosphate
  modified_base 17: mod_base = OTHER; note = 2'-O-methylcytidine-3'-phosphate
  modified_base 18: mod_base = OTHER; note = 2'-O-methylcytidine-3'-phosphate
  modified_base 19: mod_base = OTHER; note = 2'-O-methyluridine-3'-phosphate
  modified_base 20: mod_base = OTHER; note = 2'-O-methyluridine-3'-phosphate
  modified_base 21: mod_base = OTHER; note = 2'-O-methylcytidine-3'-phosphate
  modified_base 22: mod_base = OTHER; note = 2'-O-methyluridine-3'-phosphate
  modified_base 23: mod_base = OTHER; note = 2'-O-methyladenosine
ttttgtcctttctcttccttcta

SEQ ID NO: 5559 - RNA, 23 nt, synthetic construct
  source 1..23: mol_type = other RNA
  modified_base 1: mod_base = OTHER; note = 2'-O-methyluridine-3'-phosphate 5'phosphate
  modified_base 2: mod_base = OTHER; note = 2'-deoxy-2'-fluoroadenosine-3'-phosphate
  modified_base 3: mod_base = OTHER; note = 2'-O-methyladenosine-3'-phosphate
  modified_base 4: mod_base = OTHER; note = 2'-O-methyluridine-3'-phosphate
  modified_base 5: mod_base = OTHER; note = 2'-O-methylguanosine-3'-phosphate
  modified_base 6: mod_base = OTHER; note = 2'-deoxy-2'-fluoroguanosine-3'-phosphate
  modified_base 7: mod_base = OTHER; note = 2'-O-methyluridine-3'-phosphate
  modified_base 8: mod_base = OTHER; note = 2'-O-methyladenosine-3'-phosphate
  modified_base 9: mod_base = OTHER; note = 2'-O-methyladenosine-3'-phosphate
  modified_base 10: mod_base = OTHER; note = 2'-O-methyladenosine-3'-phosphate
  modified_base 11: mod_base = OTHER; note = 2'-O-methyladenosine-3'-phosphate
  modified_base 12: mod_base = OTHER; note = 2'-O-methylcytidine-3'-phosphate
  modified_base 13: mod_base = OTHER; note = 2'-O-methylguanosine-3'-phosphate
  modified_base 14: mod_base = OTHER; note = 2'-deoxy-2'-fluorouridine-3'-phosphate
  modified_base 15: mod_base = OTHER; note = 2'-O-methylguanosine-3'-phosphate
  modified_base 16: mod_base = OTHER; note = 2'-deoxy-2'-fluorouridine-3'-phosphate
  modified_base 17: mod_base = OTHER; note = 2'-O-methylguanosine-3'-phosphate
  modified_base 18: mod_base = OTHER; note = 2'-O-methylcytidine-3'-phosphate
  modified_base 19: mod_base = OTHER; note = 2'-O-methylcytidine-3'-phosphate
  modified_base 20: mod_base = OTHER; note = 2'-O-methyluridine-3'-phosphate
  modified_base 21: mod_base = OTHER; note = 2'-O-methyluridine-3'-phosphate
  modified_base 22: mod_base = OTHER; note = 2'-O-methyluridine-3'-phosphate
  modified_base 23: mod_base = OTHER; note = 2'-O-methylguanosine
taatggtaaaacgtgtgcctttg

SEQ ID NO: 5560 - RNA, 23 nt, synthetic construct
  source 1..23: mol_type = other RNA
  modified_base 1: mod_base = OTHER; note = 2'-O-methyluridine-3'-phosphate 5'phosphate
  modified_base 2: mod_base = OTHER; note = 2'-deoxy-2'-fluoroadenosine-3'-phosphate
  modified_base 3: mod_base = OTHER; note = 2'-O-methyladenosine-3'-phosphate
  modified_base 4: mod_base = OTHER; note = 2'-O-methyladenosine-3'-phosphate
  modified_base 5: mod_base = OTHER; note = 2'-O-methyluridine-3'-phosphate
  modified_base 6: mod_base = OTHER; note = 2'-deoxy-2'-fluoroguanosine-3'-phosphate
  modified_base 7: mod_base = OTHER; note = 2'-O-methylguanosine-3'-phosphate
  modified_base 8: mod_base = OTHER; note = 2'-O-methyluridine-3'-phosphate
  modified_base 9: mod_base = OTHER; note = 2'-O-methyladenosine-3'-phosphate
  modified_base 10: mod_base = OTHER; note = 2'-O-methyladenosine-3'-phosphate
  modified_base 11: mod_base = OTHER; note = 2'-O-methyladenosine-3'-phosphate
  modified_base 12: mod_base = OTHER; note = 2'-O-methyladenosine-3'-phosphate
  modified_base 13: mod_base = OTHER; note = 2'-O-methylcytidine-3'-phosphate
  modified_base 14: mod_base = OTHER; note = 2'-deoxy-2'-fluoroguanosine-3'-phosphate
  modified_base 15: mod_base = OTHER; note = 2'-O-methyluridine-3'-phosphate
  modified_base 16: mod_base = OTHER; note = 2'-deoxy-2'-fluoroguanosine-3'-phosphate
  modified_base 17: mod_base = OTHER; note = 2'-O-methyluridine-3'-phosphate
  modified_base 18: mod_base = OTHER; note = 2'-O-methylguanosine-3'-phosphate
  modified_base 19: mod_base = OTHER; note = 2'-O-methylcytidine-3'-phosphate
  modified_base 20: mod_base = OTHER; note = 2'-O-methylcytidine-3'-phosphate
  modified_base 21: mod_base = OTHER; note = 2'-O-methyluridine-3'-phosphate
  modified_base 22: mod_base = OTHER; note = 2'-O-methyluridine-3'-phosphate
  modified_base 23: mod_base = OTHER; note = 2'-O-methyluridine
taaatggtaaaacgtgtgccttt

SEQ ID NO: 5561 - RNA, 23 nt, synthetic construct
  source 1..23: mol_type = other RNA
  modified_base 1: mod_base = OTHER; note = 2'-O-methyluridine-3'-phosphate 5'phosphate
  modified_base 2: mod_base = OTHER; note = 2'-deoxy-2'-fluorouridine-3'-phosphate
  modified_base 3: mod_base = OTHER; note = 2'-O-methyladenosine-3'-phosphate
  modified_base 4: mod_base = OTHER; note = 2'-O-methyladenosine-3'-phosphate
  modified_base 5: mod_base = OTHER; note = 2'-O-methyladenosine-3'-phosphate
  modified_base 6: mod_base = OTHER; note = 2'-deoxy-2'-fluorouridine-3'-phosphate
  modified_base 7: mod_base = OTHER; note = 2'-O-methylguanosine-3'-phosphate
  modified_base 8: mod_base = OTHER; note = 2'-O-methylguanosine-3'-phosphate
  modified_base 9: mod_base = OTHER; note = 2'-O-methyluridine-3'-phosphate
  modified_base 10: mod_base = OTHER; note = 2'-O-methyladenosine-3'-phosphate
  modified_base 11: mod_base = OTHER; note = 2'-O-methyladenosine-3'-phosphate
  modified_base 12: mod_base = OTHER; note = 2'-O-methyladenosine-3'-phosphate
  modified_base 13: mod_base = OTHER; note = 2'-O-methyladenosine-3'-phosphate
  modified_base 14: mod_base = OTHER; note = 2'-deoxy-2'-fluorocytidine-3'-phosphate
  modified_base 15: mod_base = OTHER; note = 2'-O-methylguanosine-3'-phosphate
  modified_base 16: mod_base = OTHER; note = 2'-deoxy-2'-fluorouridine-3'-phosphate
  modified_base 17: mod_base = OTHER; note = 2'-O-methylguanosine-3'-phosphate
  modified_base 18: mod_base = OTHER; note = 2'-O-methyluridine-3'-phosphate
  modified_base 19: mod_base = OTHER; note = 2'-O-methylguanosine-3'-phosphate
  modified_base 20: mod_base = OTHER; note = 2'-O-methylcytidine-3'-phosphate
  modified_base 21: mod_base = OTHER; note = 2'-O-methylcytidine-3'-phosphate
  modified_base 22: mod_base = OTHER; note = 2'-O-methyluridine-3'-phosphate
  modified_base 23: mod_base = OTHER; note = 2'-O-methyluridine
ttaaatggtaaaacgtgtgcctt

SEQ ID NO: 5562 - RNA, 23 nt, synthetic construct
  source 1..23: mol_type = other RNA
  modified_base 1: mod_base = OTHER; note = 2'-O-methyluridine-3'-phosphate 5'phosphate
  modified_base 2: mod_base = OTHER; note = 2'-deoxy-2'-fluorouridine-3'-phosphate
  modified_base 3: mod_base = OTHER; note = 2'-O-methyluridine-3'-phosphate
  modified_base 4: mod_base = OTHER; note = 2'-O-methyladenosine-3'-phosphate
  modified_base 5: mod_base = OTHER; note = 2'-O-methyladenosine-3'-phosphate
  modified_base 6: mod_base = OTHER; note = 2'-deoxy-2'-fluoroadenosine-3'-phosphate
  modified_base 7: mod_base = OTHER; note = 2'-O-methyluridine-3'-phosphate
  modified_base 8: mod_base = OTHER; note = 2'-O-methylguanosine-3'-phosphate
  modified_base 9: mod_base = OTHER; note = 2'-O-methylguanosine-3'-phosphate
  modified_base 10: mod_base = OTHER; note = 2'-O-methyluridine-3'-phosphate
  modified_base 11: mod_base = OTHER; note = 2'-O-methyladenosine-3'-phosphate
  modified_base 12: mod_base = OTHER; note = 2'-O-methyladenosine-3'-phosphate
  modified_base 13: mod_base = OTHER; note = 2'-O-methyladenosine-3'-phosphate
  modified_base 14: mod_base = OTHER; note = 2'-deoxy-2'-fluoroadenosine-3'-phosphate
  modified_base 15: mod_base = OTHER; note = 2'-O-methylcytidine-3'-phosphate
  modified_base 16: mod_base = OTHER; note = 2'-deoxy-2'-fluoroguanosine-3'-phosphate
  modified_base 17: mod_base = OTHER; note = 2'-O-methyluridine-3'-phosphate
  modified_base 18: mod_base = OTHER; note = 2'-O-methylguanosine-3'-phosphate
  modified_base 19: mod_base = OTHER; note = 2'-O-methyluridine-3'-phosphate
  modified_base 20: mod_base = OTHER; note = 2'-O-methylguanosine-3'-phosphate
  modified_base 21: mod_base = OTHER; note = 2'-O-methylcytidine-3'-phosphate
  modified_base 22: mod_base = OTHER; note = 2'-O-methylcytidine-3'-phosphate
  modified_base 23: mod_base = OTHER; note = 2'-O-methyluridine
tttaaatggtaaaacgtgtgcct

SEQ ID NO: 5563 - RNA, 23 nt, synthetic construct
  source 1..23: mol_type = other RNA
  modified_base 1: mod_base = OTHER; note = 2'-O-methyluridine-3'-phosphate 5'phosphate
  modified_base 2: mod_base = OTHER; note = 2'-deoxy-2'-fluorouridine-3'-phosphate
  modified_base 3: mod_base = OTHER; note = 2'-O-methyluridine-3'-phosphate
  modified_base 4: mod_base = OTHER; note = 2'-O-methyluridine-3'-phosphate
  modified_base 5: mod_base = OTHER; note = 2'-O-methyladenosine-3'-phosphate
  modified_base 6: mod_base = OTHER; note = 2'-deoxy-2'-fluoroadenosine-3'-phosphate
  modified_base 7: mod_base = OTHER; note = 2'-O-methyladenosine-3'-phosphate
  modified_base 8: mod_base = OTHER; note = 2'-O-methyluridine-3'-phosphate
  modified_base 9: mod_base = OTHER; note = 2'-O-methylguanosine-3'-phosphate
  modified_base 10: mod_base = OTHER; note = 2'-O-methylguanosine-3'-phosphate
  modified_base 11: mod_base = OTHER; note = 2'-O-methyluridine-3'-phosphate
  modified_base 12: mod_base = OTHER; note = 2'-O-methyladenosine-3'-phosphate
  modified_base 13: mod_base = OTHER; note = 2'-O-methyladenosine-3'-phosphate
  modified_base 14: mod_base = OTHER; note = 2'-deoxy-2'-fluoroadenosine-3'-phosphate
  modified_base 15: mod_base = OTHER; note = 2'-O-methyladenosine-3'-phosphate
  modified_base 16: mod_base = OTHER; note = 2'-deoxy-2'-fluorocytidine-3'-phosphate
  modified_base 17: mod_base = OTHER; note = 2'-O-methylguanosine-3'-phosphate
  modified_base 18: mod_base = OTHER; note = 2'-O-methyluridine-3'-phosphate
  modified_base 19: mod_base = OTHER; note = 2'-O-methylguanosine-3'-phosphate
  modified_base 20: mod_base = OTHER; note = 2'-O-methyluridine-3'-phosphate
  modified_base 21: mod_base = OTHER; note = 2'-O-methylguanosine-3'-phosphate
  modified_base 22: mod_base = OTHER; note = 2'-O-methylcytidine-3'-phosphate
  modified_base 23: mod_base = OTHER; note = 2'-O-methylcytidine
ttttaaatggtaaaacgtgtgcc

SEQ ID NO: 5564 - RNA, 23 nt, synthetic construct
  source 1..23: mol_type = other RNA
  modified_base 1: mod_base = OTHER; note = 2'-O-methyluridine-3'-phosphate 5'phosphate
  modified_base 2: mod_base = OTHER; note = 2'-deoxy-2'-fluorouridine-3'-phosphate
  modified_base 3: mod_base = OTHER; note = 2'-O-methyluridine-3'-phosphate
  modified_base 4: mod_base = OTHER; note = 2'-O-methyluridine-3'-phosphate
  modified_base 5: mod_base = OTHER; note = 2'-O-methyluridine-3'-phosphate
  modified_base 6: mod_base = OTHER; note = 2'-deoxy-2'-fluoroadenosine-3'-phosphate
  modified_base 7: mod_base = OTHER; note = 2'-O-methyladenosine-3'-phosphate
  modified_base 8: mod_base = OTHER; note = 2'-O-methyladenosine-3'-phosphate
  modified_base 9: mod_base = OTHER; note = 2'-O-methyluridine-3'-phosphate
  modified_base 10: mod_base = OTHER; note = 2'-O-methylguanosine-3'-phosphate
  modified_base 11: mod_base = OTHER; note = 2'-O-methylguanosine-3'-phosphate
  modified_base 12: mod_base = OTHER; note = 2'-O-methyluridine-3'-phosphate
  modified_base 13: mod_base = OTHER; note = 2'-O-methyladenosine-3'-phosphate
  modified_base 14: mod_base = OTHER; note = 2'-deoxy-2'-fluoroadenosine-3'-phosphate
  modified_base 15: mod_base = OTHER; note = 2'-O-methyladenosine-3'-phosphate
  modified_base 16: mod_base = OTHER; note = 2'-deoxy-2'-fluoroadenosine-3'-phosphate
  modified_base 17: mod_base = OTHER; note = 2'-O-methylcytidine-3'-phosphate
  modified_base 18: mod_base = OTHER; note = 2'-O-methylguanosine-3'-phosphate
  modified_base 19: mod_base = OTHER; note = 2'-O-methyluridine-3'-phosphate
  modified_base 20: mod_base = OTHER; note = 2'-O-methylguanosine-3'-phosphate
  modified_base 21: mod_base = OTHER; note = 2'-O-methyluridine-3'-phosphate
  modified_base 22: mod_base = OTHER; note = 2'-O-methylguanosine-3'-phosphate
  modified_base 23: mod_base = OTHER; note = 2'-O-methylcytidine
tttttaaatggtaaaacgtgtgc

SEQ ID NO: 5565 - RNA, 23 nt, synthetic construct
  source 1..23: mol_type = other RNA
  modified_base 1: mod_base = OTHER; note = 2'-O-methyluridine-3'-phosphate 5'phosphate
  modified_base 2: mod_base = OTHER; note = 2'-deoxy-2'-fluoroadenosine-3'-phosphate
  modified_base 3: mod_base = OTHER; note = 2'-O-methyluridine-3'-phosphate
  modified_base 4: mod_base = OTHER; note = 2'-O-methyluridine-3'-phosphate
  modified_base 5: mod_base = OTHER; note = 2'-O-methyluridine-3'-phosphate
  modified_base 6: mod_base = OTHER; note = 2'-deoxy-2'-fluorouridine-3'-phosphate
  modified_base 7: mod_base = OTHER; note = 2'-O-methyladenosine-3'-phosphate
  modified_base 8: mod_base = OTHER; note = 2'-O-methyladenosine-3'-phosphate
  modified_base 9: mod_base = OTHER; note = 2'-O-methyladenosine-3'-phosphate
  modified_base 10: mod_base = OTHER; note = 2'-O-methyluridine-3'-phosphate
  modified_base 11: mod_base = OTHER; note = 2'-O-methylguanosine-3'-phosphate
  modified_base 12: mod_base = OTHER; note = 2'-O-methylguanosine-3'-phosphate
  modified_base 13: mod_base = OTHER; note = 2'-O-methyluridine-3'-phosphate
  modified_base 14: mod_base = OTHER; note = 2'-deoxy-2'-fluoroadenosine-3'-phosphate
  modified_base 15: mod_base = OTHER; note = 2'-O-methyladenosine-3'-phosphate
  modified_base 16: mod_base = OTHER; note = 2'-deoxy-2'-fluoroadenosine-3'-phosphate
  modified_base 17: mod_base = OTHER; note = 2'-O-methyladenosine-3'-phosphate
  modified_base 18: mod_base = OTHER; note = 2'-O-methylcytidine-3'-phosphate
  modified_base 19: mod_base = OTHER; note = 2'-O-methylguanosine-3'-phosphate
  modified_base 20: mod_base = OTHER; note = 2'-O-methyluridine-3'-phosphate
  modified_base 21: mod_base = OTHER; note = 2'-O-methylguanosine-3'-phosphate
  modified_base 22: mod_base = OTHER; note = 2'-O-methyluridine-3'-phosphate
  modified_base 23: mod_base = OTHER; note = 2'-O-methylguanosine
tattttaaatggtaaaacgtgtg

SEQ ID NO: 5566 - RNA, 23 nt, synthetic construct
  source 1..23: mol_type = other RNA
  modified_base 1: mod_base = OTHER; note = 2'-O-methyluridine-3'-phosphate 5'phosphate
  modified_base 2: mod_base = OTHER; note = 2'-deoxy-2'-fluorouridine-3'-phosphate
  modified_base 3: mod_base = OTHER; note = 2'-O-methyladenosine-3'-phosphate
  modified_base 4: mod_base = OTHER; note = 2'-O-methyluridine-3'-phosphate
  modified_base 5: mod_base = OTHER; note = 2'-O-methyluridine-3'-phosphate
  modified_base 6: mod_base = OTHER; note = 2'-deoxy-2'-fluorouridine-3'-phosphate
  modified_base 7: mod_base = OTHER; note = 2'-O-methyluridine-3'-phosphate
  modified_base 8: mod_base = OTHER; note = 2'-O-methyladenosine-3'-phosphate
  modified_base 9: mod_base = OTHER; note = 2'-O-methyladenosine-3'-phosphate
  modified_base 10: mod_base = OTHER; note = 2'-O-methyladenosine-3'-phosphate
  modified_base 11: mod_base = OTHER; note = 2'-O-methyluridine-3'-phosphate
  modified_base 12: mod_base = OTHER; note = 2'-O-methylguanosine-3'-phosphate
  modified_base 13: mod_base = OTHER; note = 2'-O-methylguanosine-3'-phosphate
  modified_base 14: mod_base = OTHER; note = 2'-deoxy-2'-fluorouridine-3'-phosphate
  modified_base 15: mod_base = OTHER; note = 2'-O-methyladenosine-3'-phosphate
  modified_base 16: mod_base = OTHER; note = 2'-deoxy-2'-fluoroadenosine-3'-phosphate
  modified_base 17: mod_base = OTHER; note = 2'-O-methyladenosine-3'-phosphate
  modified_base 18: mod_base = OTHER; note = 2'-O-methyladenosine-3'-phosphate
  modified_base 19: mod_base = OTHER; note = 2'-O-methylcytidine-3'-phosphate
  modified_base 20: mod_base = OTHER; note = 2'-O-methylguanosine-3'-phosphate
  modified_base 21: mod_base = OTHER; note = 2'-O-methyluridine-3'-phosphate
  modified_base 22: mod_base = OTHER; note = 2'-O-methylguanosine-3'-phosphate
  modified_base 23: mod_base = OTHER; note = 2'-O-methyluridine
ttattttaaatggtaaaacgtgt

SEQ ID NO: 5567 - RNA, 23 nt, synthetic construct
  source 1..23: mol_type = other RNA
  modified_base 1: mod_base = OTHER; note = 2'-O-methyluridine-3'-phosphate 5'phosphate
  modified_base 2: mod_base = OTHER; note = 2'-deoxy-2'-fluoroadenosine-3'-phosphate
  modified_base 3: mod_base = OTHER; note = 2'-O-methyluridine-3'-phosphate
  modified_base 4: mod_base = OTHER; note = 2'-O-methyladenosine-3'-phosphate
  modified_base 5: mod_base = OTHER; note = 2'-O-methyluridine-3'-phosphate
  modified_base 6: mod_base = OTHER; note = 2'-deoxy-2'-fluorouridine-3'-phosphate
  modified_base 7: mod_base = OTHER; note = 2'-O-methyluridine-3'-phosphate
  modified_base 8: mod_base = OTHER; note = 2'-O-methyluridine-3'-phosphate
  modified_base 9: mod_base = OTHER; note = 2'-O-methyladenosine-3'-phosphate
  modified_base 10: mod_base = OTHER; note = 2'-O-methyladenosine-3'-phosphate
  modified_base 11: mod_base = OTHER; note = 2'-O-methyladenosine-3'-phosphate
  modified_base 12: mod_base = OTHER; note = 2'-O-methyluridine-3'-phosphate
  modified_base 13: mod_base = OTHER; note = 2'-O-methylguanosine-3'-phosphate
  modified_base 14: mod_base = OTHER; note = 2'-deoxy-2'-fluoroguanosine-3'-phosphate
  modified_base 15: mod_base = OTHER; note = 2'-O-methyluridine-3'-phosphate
  modified_base 16: mod_base = OTHER; note = 2'-deoxy-2'-fluoroadenosine-3'-phosphate
  modified_base 17: mod_base = OTHER; note = 2'-O-methyladenosine-3'-phosphate
  modified_base 18: mod_base = OTHER; note = 2'-O-methyladenosine-3'-phosphate
  modified_base 19: mod_base = OTHER; note = 2'-O-methyladenosine-3'-phosphate
  modified_base 20: mod_base = OTHER; note = 2'-O-methylcytidine-3'-phosphate
  modified_base 21: mod_base = OTHER; note = 2'-O-methylguanosine-3'-phosphate
  modified_base 22: mod_base = OTHER; note = 2'-O-methyluridine-3'-phosphate
  modified_base 23: mod_base = OTHER; note = 2'-O-methylguanosine
tatattttaaatggtaaaacgtg

SEQ ID NO: 5568 - RNA, 23 nt, synthetic construct
  source 1..23: mol_type = other RNA
  modified_base 1: mod_base = OTHER; note = 2'-O-methyluridine-3'-phosphate 5'phosphate
  modified_base 2: mod_base = OTHER; note = 2'-deoxy-2'-fluoroadenosine-3'-phosphate
  modified_base 3: mod_base = OTHER; note = 2'-O-methyladenosine-3'-phosphate
  modified_base 4: mod_base = OTHER; note = 2'-O-methyluridine-3'-phosphate
  modified_base 5: mod_base = OTHER; note = 2'-O-methyladenosine-3'-phosphate
  modified_base 6: mod_base = OTHER; note = 2'-deoxy-2'-fluorouridine-3'-phosphate
  modified_base 7: mod_base = OTHER; note = 2'-O-methyluridine-3'-phosphate
  modified_base 8: mod_base = OTHER; note = 2'-O-methyluridine-3'-phosphate
  modified_base 9: mod_base = OTHER; note = 2'-O-methyluridine-3'-phosphate
  modified_base 10: mod_base = OTHER; note = 2'-O-methyladenosine-3'-phosphate
  modified_base 11: mod_base = OTHER; note = 2'-O-methyladenosine-3'-phosphate
  modified_base 12: mod_base = OTHER; note = 2'-O-methyladenosine-3'-phosphate
  modified_base 13: mod_base = OTHER; note = 2'-O-methyluridine-3'-phosphate
  modified_base 14: mod_base = OTHER; note = 2'-deoxy-2'-fluoroguanosine-3'-phosphate
  modified_base 15: mod_base = OTHER; note = 2'-O-methylguanosine-3'-phosphate
  modified_base 16: mod_base = OTHER; note = 2'-deoxy-2'-fluorouridine-3'-phosphate
  modified_base 17: mod_base = OTHER; note = 2'-O-methyladenosine-3'-phosphate
  modified_base 18: mod_base = OTHER; note = 2'-O-methyladenosine-3'-phosphate
  modified_base 19: mod_base = OTHER; note = 2'-O-methyladenosine-3'-phosphate
  modified_base 20: mod_base = OTHER; note = 2'-O-methyladenosine-3'-phosphate
  modified_base 21: mod_base = OTHER; note = 2'-O-methylcytidine-3'-phosphate
  modified_base 22: mod_base = OTHER; note = 2'-O-methylguanosine-3'-phosphate
  modified_base 23: mod_base = OTHER; note = 2'-O-methyluridine
taatattttaaatggtaaaacgt

SEQ ID NO: 5569 - RNA, 23 nt, synthetic construct
  source 1..23: mol_type = other RNA
  modified_base 1: mod_base = OTHER; note = 2'-O-methyluridine-3'-phosphate 5'phosphate
  modified_base 2: mod_base = OTHER; note = 2'-deoxy-2'-fluorocytidine-3'-phosphate
  modified_base 3: mod_base = OTHER; note = 2'-O-methyladenosine-3'-phosphate
  modified_base 4: mod_base = OTHER; note = 2'-O-methyladenosine-3'-phosphate
  modified_base 5: mod_base = OTHER; note = 2'-O-methyluridine-3'-phosphate
  modified_base 6: mod_base = OTHER; note = 2'-deoxy-2'-fluoroadenosine-3'-phosphate
  modified_base 7: mod_base = OTHER; note = 2'-O-methyluridine-3'-phosphate
  modified_base 8: mod_base = OTHER; note = 2'-O-methyluridine-3'-phosphate
  modified_base 9: mod_base = OTHER; note = 2'-O-methyluridine-3'-phosphate
  modified_base 10: mod_base = OTHER; note = 2'-O-methyluridine-3'-phosphate
  modified_base 11: mod_base = OTHER; note = 2'-O-methyladenosine-3'-phosphate
  modified_base 12: mod_base = OTHER; note = 2'-O-methyladenosine-3'-phosphate
  modified_base 13: mod_base = OTHER; note = 2'-O-methyladenosine-3'-phosphate
  modified_base 14: mod_base = OTHER; note = 2'-deoxy-2'-fluorouridine-3'-phosphate
  modified_base 15: mod_base = OTHER; note = 2'-O-methylguanosine-3'-phosphate
  modified_base 16: mod_base = OTHER; note = 2'-deoxy-2'-fluoroguanosine-3'-phosphate
  modified_base 17: mod_base = OTHER; note = 2'-O-methyluridine-3'-phosphate
  modified_base 18: mod_base = OTHER; note = 2'-O-methyladenosine-3'-phosphate
  modified_base 19: mod_base = OTHER; note = 2'-O-methyladenosine-3'-phosphate
  modified_base 20: mod_base = OTHER; note = 2'-O-methyladenosine-3'-phosphate
  modified_base 21: mod_base = OTHER; note = 2'-O-methyladenosine-3'-phosphate
  modified_base 22: mod_base = OTHER; note = 2'-O-methylcytidine-3'-phosphate
  modified_base 23: mod_base = OTHER; note = 2'-O-methylguanosine
tcaatattttaaatggtaaaacg

SEQ ID NO: 5570 - RNA, 23 nt, synthetic construct
  source 1..23: mol_type = other RNA
  modified_base 1: mod_base = OTHER; note = 2'-O-methyluridine-3'-phosphate 5'phosphate
  modified_base 2: mod_base = OTHER; note = 2'-deoxy-2'-fluoroadenosine-3'-phosphate
  modified_base 3: mod_base = OTHER; note = 2'-O-methylcytidine-3'-phosphate
  modified_base 4: mod_base = OTHER; note = 2'-O-methyladenosine-3'-phosphate
  modified_base 5: mod_base = OTHER; note = 2'-O-methyladenosine-3'-phosphate
  modified_base 6: mod_base = OTHER; note = 2'-deoxy-2'-fluorouridine-3'-phosphate
  modified_base 7: mod_base = OTHER; note = 2'-O-methyladenosine-3'-phosphate
  modified_base 8: mod_base = OTHER; note = 2'-O-methyluridine-3'-phosphate
  modified_base 9: mod_base = OTHER; note = 2'-O-methyluridine-3'-phosphate
  modified_base 10: mod_base = OTHER; note = 2'-O-methyluridine-3'-phosphate
  modified_base 11: mod_base = OTHER; note = 2'-O-methyluridine-3'-phosphate
  modified_base 12: mod_base = OTHER; note = 2'-O-methyladenosine-3'-phosphate
  modified_base 13: mod_base = OTHER; note = 2'-O-methyladenosine-3'-phosphate
  modified_base 14: mod_base = OTHER; note = 2'-deoxy-2'-fluoroadenosine-3'-phosphate
  modified_base 15: mod_base = OTHER; note = 2'-O-methyluridine-3'-phosphate
  modified_base 16: mod_base = OTHER; note = 2'-deoxy-2'-fluoroguanosine-3'-phosphate
  modified_base 17: mod_base = OTHER; note = 2'-O-methylguanosine-3'-phosphate
  modified_base 18: mod_base = OTHER; note = 2'-O-methyluridine-3'-phosphate
  modified_base 19: mod_base = OTHER; note = 2'-O-methyladenosine-3'-phosphate
  modified_base 20: mod_base = OTHER; note = 2'-O-methyladenosine-3'-phosphate
  modified_base 21: mod_base = OTHER; note = 2'-O-methyladenosine-3'-phosphate
  modified_base 22: mod_base = OTHER; note = 2'-O-methyladenosine-3'-phosphate
  modified_base 23: mod_base = OTHER; note = 2'-O-methylcytidine
tacaatattttaaatggtaaaac

SEQ ID NO: 5571 - RNA, 23 nt, synthetic construct
  source 1..23: mol_type = other RNA
  modified_base 1: mod_base = OTHER; note = 2'-O-methyluridine-3'-phosphate 5'phosphate
  modified_base 2: mod_base = OTHER; note = 2'-deoxy-2'-fluorouridine-3'-phosphate
  modified_base 3: mod_base = OTHER; note = 2'-O-methyluridine-3'-phosphate
  modified_base 4: mod_base = OTHER; note = 2'-O-methyluridine-3'-phosphate
  modified_base 5: mod_base = OTHER; note = 2'-O-methylguanosine-3'-phosphate
  modified_base 6: mod_base = OTHER; note = 2'-deoxy-2'-fluoroguanosine-3'-phosphate
  modified_base 7: mod_base = OTHER; note = 2'-O-methyluridine-3'-phosphate
  modified_base 8: mod_base = OTHER; note = 2'-O-methyladenosine-3'-phosphate
  modified_base 9: mod_base = OTHER; note = 2'-O-methyladenosine-3'-phosphate
  modified_base 10: mod_base = OTHER; note = 2'-O-methylcytidine-3'-phosphate
  modified_base 11: mod_base = OTHER; note = 2'-O-methyladenosine-3'-phosphate
  modified_base 12: mod_base = OTHER; note = 2'-O-methyladenosine-3'-phosphate
  modified_base 13: mod_base = OTHER; note = 2'-O-methyluridine-3'-phosphate
  modified_base 14: mod_base = OTHER; note = 2'-deoxy-2'-fluoroadenosine-3'-phosphate
  modified_base 15: mod_base = OTHER; note = 2'-O-methyluridine-3'-phosphate
  modified_base 16: mod_base = OTHER; note = 2'-deoxy-2'-fluorouridine-3'-phosphate
  modified_base 17: mod_base = OTHER; note = 2'-O-methyluridine-3'-phosphate
  modified_base 18: mod_base = OTHER; note = 2'-O-methyluridine-3'-phosphate
  modified_base 19: mod_base = OTHER; note = 2'-O-methyladenosine-3'-phosphate
  modified_base 20: mod_base = OTHER; note = 2'-O-methyladenosine-3'-phosphate
  modified_base 21: mod_base = OTHER; note = 2'-O-methyladenosine-3'-phosphate
  modified_base 22: mod_base = OTHER; note = 2'-O-methyluridine-3'-phosphate
  modified_base 23: mod_base = OTHER; note = 2'-O-methylguanosine
ttttggtaacaatattttaaatg

SEQ ID NO: 5572 - RNA, 23 nt, synthetic construct
  source 1..23: mol_type = other RNA
  modified_base 1: mod_base = OTHER; note = 2'-O-methyluridine-3'-phosphate 5'phosphate
  modified_base 2: mod_base = OTHER; note = 2'-deoxy-2'-fluoroguanosine-3'-phosphate
  modified_base 3: mod_base = OTHER; note = 2'-O-methyluridine-3'-phosphate
  modified_base 4: mod_base = OTHER; note = 2'-O-methyluridine-3'-phosphate
  modified_base 5: mod_base = OTHER; note = 2'-O-methyluridine-3'-phosphate
  modified_base 6: mod_base = OTHER; note = 2'-deoxy-2'-fluoroguanosine-3'-phosphate
  modified_base 7: mod_base = OTHER; note = 2'-O-methylguanosine-3'-phosphate
  modified_base 8: mod_base = OTHER; note = 2'-O-methyluridine-3'-phosphate
  modified_base 9: mod_base = OTHER; note = 2'-O-methyladenosine-3'-phosphate
  modified_base 10: mod_base = OTHER; note = 2'-O-methyladenosine-3'-phosphate
  modified_base 11: mod_base = OTHER; note = 2'-O-methylcytidine-3'-phosphate
  modified_base 12: mod_base = OTHER; note = 2'-O-methyladenosine-3'-phosphate
  modified_base 13: mod_base = OTHER; note = 2'-O-methyladenosine-3'-phosphate
  modified_base 14: mod_base = OTHER; note = 2'-deoxy-2'-fluorouridine-3'-phosphate
  modified_base 15: mod_base = OTHER; note = 2'-O-methyladenosine-3'-phosphate
  modified_base 16: mod_base = OTHER; note = 2'-deoxy-2'-fluorouridine-3'-phosphate
  modified_base 17: mod_base = OTHER; note = 2'-O-methyluridine-3'-phosphate
  modified_base 18: mod_base = OTHER; note = 2'-O-methyluridine-3'-phosphate
  modified_base 19: mod_base = OTHER; note = 2'-O-methyluridine-3'-phosphate
  modified_base 20: mod_base = OTHER; note = 2'-O-methyladenosine-3'-phosphate
  modified_base 21: mod_base = OTHER; note = 2'-O-methyladenosine-3'-phosphate
  modified_base 22: mod_base = OTHER; note = 2'-O-methyladenosine-3'-phosphate
  modified_base 23: mod_base = OTHER; note = 2'-O-methyluridine
tgtttggtaacaatattttaaat

SEQ ID NO: 5573 - RNA, 23 nt, synthetic construct
  source 1..23: mol_type = other RNA
  modified_base 1: mod_base = OTHER; note = 2'-O-methyluridine-3'-phosphate 5'phosphate
  modified_base 2: mod_base = OTHER; note = 2'-deoxy-2'-fluorouridine-3'-phosphate
  modified_base 3: mod_base = OTHER; note = 2'-O-methylguanosine-3'-phosphate
  modified_base 4: mod_base = OTHER; note = 2'-O-methyluridine-3'-phosphate
  modified_base 5: mod_base = OTHER; note = 2'-O-methyluridine-3'-phosphate
  modified_base 6: mod_base = OTHER; note = 2'-deoxy-2'-fluorouridine-3'-phosphate
  modified_base 7: mod_base = OTHER; note = 2'-O-methylguanosine-3'-phosphate
  modified_base 8: mod_base = OTHER; note = 2'-O-methylguanosine-3'-phosphate
  modified_base 9: mod_base = OTHER; note = 2'-O-methyluridine-3'-phosphate
  modified_base 10: mod_base = OTHER; note = 2'-O-methyladenosine-3'-phosphate
  modified_base 11: mod_base = OTHER; note = 2'-O-methyladenosine-3'-phosphate
  modified_base 12: mod_base = OTHER; note = 2'-O-methylcytidine-3'-phosphate
  modified_base 13: mod_base = OTHER; note = 2'-O-methyladenosine-3'-phosphate
  modified_base 14: mod_base = OTHER; note = 2'-deoxy-2'-fluoroadenosine-3'-phosphate
  modified_base 15: mod_base = OTHER; note = 2'-O-methyluridine-3'-phosphate
  modified_base 16: mod_base = OTHER; note = 2'-deoxy-2'-fluoroadenosine-3'-phosphate
  modified_base 17: mod_base = OTHER; note = 2'-O-methyluridine-3'-phosphate
  modified_base 18: mod_base = OTHER; note = 2'-O-methyluridine-3'-phosphate
  modified_base 19: mod_base = OTHER; note = 2'-O-methyluridine-3'-phosphate
  modified_base 20: mod_base = OTHER; note = 2'-O-methyluridine-3'-phosphate
  modified_base 21: mod_base = OTHER; note = 2'-O-methyladenosine-3'-phosphate
  modified_base 22: mod_base = OTHER; note = 2'-O-methyladenosine-3'-phosphate
  modified_base 23: mod_base = OTHER; note = 2'-O-methyladenosine
ttgtttggtaacaatattttaaa

SEQ ID NO: 5574 - RNA, 23 nt, synthetic construct
  source 1..23: mol_type = other RNA
  modified_base 1: mod_base = OTHER; note = 2'-O-methyluridine-3'-phosphate 5'phosphate
  modified_base 2: mod_base = OTHER; note = 2'-deoxy-2'-fluorouridine-3'-phosphate
  modified_base 3: mod_base = OTHER; note = 2'-O-methyluridine-3'-phosphate
  modified_base 4: mod_base = OTHER; note = 2'-O-methylguanosine-3'-phosphate
  modified_base 5: mod_base = OTHER; note = 2'-O-methyluridine-3'-phosphate
  modified_base 6: mod_base = OTHER; note = 2'-deoxy-2'-fluorouridine-3'-phosphate
  modified_base 7: mod_base = OTHER; note = 2'-O-methyluridine-3'-phosphate
  modified_base 8: mod_base = OTHER; note = 2'-O-methylguanosine-3'-phosphate
  modified_base 9: mod_base = OTHER; note = 2'-O-methylguanosine-3'-phosphate
  modified_base 10: mod_base = OTHER; note = 2'-O-methyluridine-3'-phosphate
  modified_base 11: mod_base = OTHER; note = 2'-O-methyladenosine-3'-phosphate
  modified_base 12: mod_base = OTHER; note = 2'-O-methyladenosine-3'-phosphate
  modified_base 13: mod_base = OTHER; note = 2'-O-methylcytidine-3'-phosphate
  modified_base 14: mod_base = OTHER; note = 2'-deoxy-2'-fluoroadenosine-3'-phosphate
  modified_base 15: mod_base = OTHER; note = 2'-O-methyladenosine-3'-phosphate
  modified_base 16: mod_base = OTHER; note = 2'-deoxy-2'-fluorouridine-3'-phosphate
  modified_base 17: mod_base = OTHER; note = 2'-O-methyladenosine-3'-phosphate
  modified_base 18: mod_base = OTHER; note = 2'-O-methyluridine-3'-phosphate
  modified_base 19: mod_base = OTHER; note = 2'-O-methyluridine-3'-phosphate
  modified_base 20: mod_base = OTHER; note = 2'-O-methyluridine-3'-phosphate
  modified_base 21: mod_base = OTHER; note = 2'-O-methyluridine-3'-phosphate
  modified_base 22: mod_base = OTHER; note = 2'-O-methyladenosine-3'-phosphate
  modified_base 23: mod_base = OTHER; note = 2'-O-methyladenosine
tttgtttggtaacaatattttaa

SEQ ID NO: 5575 - RNA, 23 nt, synthetic construct
  source 1..23: mol_type = other RNA
  modified_base 1: mod_base = OTHER; note = 2'-O-methyluridine-3'-phosphate 5'phosphate
  modified_base 2: mod_base = OTHER; note = 2'-deoxy-2'-fluorouridine-3'-phosphate
  modified_base 3: mod_base = OTHER; note = 2'-O-methyluridine-3'-phosphate
  modified_base 4: mod_base = OTHER; note = 2'-O-methyluridine-3'-phosphate
  modified_base 5: mod_base = OTHER; note = 2'-O-methylguanosine-3'-phosphate
  modified_base 6: mod_base = OTHER; note = 2'-deoxy-2'-fluorouridine-3'-phosphate
  modified_base 7: mod_base = OTHER; note = 2'-O-methyluridine-3'-phosphate
  modified_base 8: mod_base = OTHER; note = 2'-O-methyluridine-3'-phosphate
  modified_base 9: mod_base = OTHER; note = 2'-O-methylguanosine-3'-phosphate
  modified_base 10: mod_base = OTHER; note = 2'-O-methylguanosine-3'-phosphate
  modified_base 11: mod_base = OTHER; note = 2'-O-methyluridine-3'-phosphate
  modified_base 12: mod_base = OTHER; note = 2'-O-methyladenosine-3'-phosphate
  modified_base 13: mod_base = OTHER; note = 2'-O-methyladenosine-3'-phosphate
  modified_base 14: mod_base = OTHER; note = 2'-deoxy-2'-fluorocytidine-3'-phosphate
  modified_base 15: mod_base = OTHER; note = 2'-O-methyladenosine-3'-phosphate
  modified_base 16: mod_base = OTHER; note = 2'-deoxy-2'-fluoroadenosine-3'-phosphate
  modified_base 17: mod_base = OTHER; note = 2'-O-methyluridine-3'-phosphate
  modified_base 18: mod_base = OTHER; note = 2'-O-methyladenosine-3'-phosphate
  modified_base 19: mod_base = OTHER; note = 2'-O-methyluridine-3'-phosphate
  modified_base 20: mod_base = OTHER; note = 2'-O-methyluridine-3'-phosphate
  modified_base 21: mod_base = OTHER; note = 2'-O-methyluridine-3'-phosphate
  modified_base 22: mod_base = OTHER; note = 2'-O-methyluridine-3'-phosphate
  modified_base 23: mod_base = OTHER; note = 2'-O-methyladenosine
ttttgtttggtaacaatatttta

SEQ ID NO: 5576 - RNA, 23 nt, synthetic construct
  source 1..23: mol_type = other RNA
  modified_base 1: mod_base = OTHER; note = 2'-O-methyluridine-3'-phosphate 5'phosphate
  modified_base 2: mod_base = OTHER; note = 2'-deoxy-2'-fluorouridine-3'-phosphate
  modified_base 3: mod_base = OTHER; note = 2'-O-methyluridine-3'-phosphate
  modified_base 4: mod_base = OTHER; note = 2'-O-methyluridine-3'-phosphate
  modified_base 5: mod_base = OTHER; note = 2'-O-methyluridine-3'-phosphate
  modified_base 6: mod_base = OTHER; note = 2'-deoxy-2'-fluoroguanosine-3'-phosphate
  modified_base 7: mod_base = OTHER; note = 2'-O-methyluridine-3'-phosphate
  modified_base 8: mod_base = OTHER; note = 2'-O-methyluridine-3'-phosphate
  modified_base 9: mod_base = OTHER; note = 2'-O-methyluridine-3'-phosphate
  modified_base 10: mod_base = OTHER; note = 2'-O-methylguanosine-3'-phosphate
  modified_base 11: mod_base = OTHER; note = 2'-O-methylguanosine-3'-phosphate
  modified_base 12: mod_base = OTHER; note = 2'-O-methyluridine-3'-phosphate
  modified_base 13: mod_base = OTHER; note = 2'-O-methyladenosine-3'-phosphate
  modified_base 14: mod_base = OTHER; note = 2'-deoxy-2'-fluoroadenosine-3'-phosphate
  modified_base 15: mod_base = OTHER; note = 2'-O-methylcytidine-3'-phosphate
  modified_base 16: mod_base = OTHER; note = 2'-deoxy-2'-fluoroadenosine-3'-phosphate
  modified_base 17: mod_base = OTHER; note = 2'-O-methyladenosine-3'-phosphate
  modified_base 18: mod_base = OTHER; note = 2'-O-methyluridine-3'-phosphate
  modified_base 19: mod_base = OTHER; note = 2'-O-methyladenosine-3'-phosphate
  modified_base 20: mod_base = OTHER; note = 2'-O-methyluridine-3'-phosphate
  modified_base 21: mod_base = OTHER; note = 2'-O-methyluridine-3'-phosphate
  modified_base 22: mod_base = OTHER; note = 2'-O-methyluridine-3'-phosphate
  modified_base 23: mod_base = OTHER; note = 2'-O-methyluridine
tttttgtttggtaacaatatttt

SEQ ID NO: 5577 - RNA, 23 nt, synthetic construct
  source 1..23: mol_type = other RNA
  modified_base 1: mod_base = OTHER; note = 2'-O-methyluridine-3'-phosphate 5'phosphate
  modified_base 2: mod_base = OTHER; note = 2'-deoxy-2'-fluorouridine-3'-phosphate
  modified_base 3: mod_base = OTHER; note = 2'-O-methyluridine-3'-phosphate
  modified_base 4: mod_base = OTHER; note = 2'-O-methyluridine-3'-phosphate
  modified_base 5: mod_base = OTHER; note = 2'-O-methyluridine-3'-phosphate
  modified_base 6: mod_base = OTHER; note = 2'-deoxy-2'-fluorouridine-3'-phosphate
  modified_base 7: mod_base = OTHER; note = 2'-O-methylguanosine-3'-phosphate
  modified_base 8: mod_base = OTHER; note = 2'-O-methyluridine-3'-phosphate
  modified_base 9: mod_base = OTHER; note = 2'-O-methyluridine-3'-phosphate
  modified_base 10: mod_base = OTHER; note = 2'-O-methyluridine-3'-phosphate
  modified_base 11: mod_base = OTHER; note = 2'-O-methylguanosine-3'-phosphate
  modified_base 12: mod_base = OTHER; note = 2'-O-methylguanosine-3'-phosphate
  modified_base 13: mod_base = OTHER; note = 2'-O-methyluridine-3'-phosphate
  modified_base 14: mod_base = OTHER; note = 2'-deoxy-2'-fluoroadenosine-3'-phosphate
  modified_base 15: mod_base = OTHER; note = 2'-O-methyladenosine-3'-phosphate
  modified_base 16: mod_base = OTHER; note = 2'-deoxy-2'-fluorocytidine-3'-phosphate
  modified_base 17: mod_base = OTHER; note = 2'-O-methyladenosine-3'-phosphate
  modified_base 18: mod_base = OTHER; note = 2'-O-methyladenosine-3'-phosphate
  modified_base 19: mod_base = OTHER; note = 2'-O-methyluridine-3'-phosphate
  modified_base 20: mod_base = OTHER; note = 2'-O-methyladenosine-3'-phosphate
  modified_base 21: mod_base = OTHER; note = 2'-O-methyluridine-3'-phosphate
  modified_base 22: mod_base = OTHER; note = 2'-O-methyluridine-3'-phosphate
  modified_base 23: mod_base = OTHER; note = 2'-O-methyluridine
ttttttgtttggtaacaatattt

SEQ ID NO: 5578 - RNA, 23 nt, synthetic construct
  source 1..23: mol_type = other RNA
  modified_base 1: mod_base = OTHER; note = 2'-O-methyluridine-3'-phosphate 5'phosphate
  modified_base 2: mod_base = OTHER; note = 2'-deoxy-2'-fluoroadenosine-3'-phosphate
  modified_base 3: mod_base = OTHER; note = 2'-O-methyluridine-3'-phosphate
  modified_base 4: mod_base = OTHER; note = 2'-O-methyluridine-3'-phosphate
  modified_base 5: mod_base = OTHER; note = 2'-O-methyluridine-3'-phosphate
  modified_base 6: mod_base = OTHER; note = 2'-deoxy-2'-fluorouridine-3'-phosphate
  modified_base 7: mod_base = OTHER; note = 2'-O-methyluridine-3'-phosphate
  modified_base 8: mod_base = OTHER; note = 2'-O-methylguanosine-3'-phosphate
  modified_base 9: mod_base = OTHER; note = 2'-O-methyluridine-3'-phosphate
  modified_base 10: mod_base = OTHER; note = 2'-O-methyluridine-3'-phosphate
  modified_base 11: mod_base = OTHER; note = 2'-O-methyluridine-3'-phosphate
  modified_base 12: mod_base = OTHER; note = 2'-O-methylguanosine-3'-phosphate
  modified_base 13: mod_base = OTHER; note = 2'-O-methylguanosine-3'-phosphate
  modified_base 14: mod_base = OTHER; note = 2'-deoxy-2'-fluorouridine-3'-phosphate
  modified_base 15: mod_base = OTHER; note = 2'-O-methyladenosine-3'-phosphate
  modified_base 16: mod_base = OTHER; note = 2'-deoxy-2'-fluoroadenosine-3'-phosphate
  modified_base 17: mod_base = OTHER; note = 2'-O-methylcytidine-3'-phosphate
  modified_base 18: mod_base = OTHER; note = 2'-O-methyladenosine-3'-phosphate
  modified_base 19: mod_base = OTHER; note = 2'-O-methyladenosine-3'-phosphate
  modified_base 20: mod_base = OTHER; note = 2'-O-methyluridine-3'-phosphate
  modified_base 21: mod_base = OTHER; note = 2'-O-methyladenosine-3'-phosphate
  modified_base 22: mod_base = OTHER; note = 2'-O-methyluridine-3'-phosphate
  modified_base 23: mod_base = OTHER; note = 2'-O-methyluridine
tatttttgtttggtaacaatatt

SEQ ID NO: 5579 - RNA, 23 nt, synthetic construct
  source 1..23: mol_type = other RNA
  modified_base 1: mod_base = OTHER; note = 2'-O-methyluridine-3'-phosphate 5'phosphate
  modified_base 2: mod_base = OTHER; note = 2'-deoxy-2'-fluorouridine-3'-phosphate
  modified_base 3: mod_base = OTHER; note = 2'-O-methyladenosine-3'-phosphate
  modified_base 4: mod_base = OTHER; note = 2'-O-methyluridine-3'-phosphate
  modified_base 5: mod_base = OTHER; note = 2'-O-methyluridine-3'-phosphate
  modified_base 6: mod_base = OTHER; note = 2'-deoxy-2'-fluorouridine-3'-phosphate
  modified_base 7: mod_base = OTHER; note = 2'-O-methyluridine-3'-phosphate
  modified_base 8: mod_base = OTHER; note = 2'-O-methyluridine-3'-phosphate
  modified_base 9: mod_base = OTHER; note = 2'-O-methylguanosine-3'-phosphate
  modified_base 10: mod_base = OTHER; note = 2'-O-methyluridine-3'-phosphate
  modified_base 11: mod_base = OTHER; note = 2'-O-methyluridine-3'-phosphate
  modified_base 12: mod_base = OTHER; note = 2'-O-methyluridine-3'-phosphate
  modified_base 13: mod_base = OTHER; note = 2'-O-methylguanosine-3'-phosphate
  modified_base 14: mod_base = OTHER; note = 2'-deoxy-2'-fluoroguanosine-3'-phosphate
  modified_base 15: mod_base = OTHER; note = 2'-O-methyluridine-3'-phosphate
  modified_base 16: mod_base = OTHER; note = 2'-deoxy-2'-fluoroadenosine-3'-phosphate
  modified_base 17: mod_base = OTHER; note = 2'-O-methyladenosine-3'-phosphate
  modified_base 18: mod_base = OTHER; note = 2'-O-methylcytidine-3'-phosphate
  modified_base 19: mod_base = OTHER; note = 2'-O-methyladenosine-3'-phosphate
  modified_base 20: mod_base = OTHER; note = 2'-O-methyladenosine-3'-phosphate
  modified_base 21: mod_base = OTHER; note = 2'-O-methyluridine-3'-phosphate
  modified_base 22: mod_base = OTHER; note = 2'-O-methyladenosine-3'-phosphate
  modified_base 23: mod_base = OTHER; note = 2'-O-methyluridine
ttatttttgtttggtaacaatat

SEQ ID NO: 5580 - RNA, 23 nt, synthetic construct
  source 1..23: mol_type = other RNA
  modified_base 1: mod_base = OTHER; note = 2'-O-methyluridine-3'-phosphate 5'phosphate
  modified_base 2: mod_base = OTHER; note = 2'-deoxy-2'-fluoroadenosine-3'-phosphate
  modified_base 3: mod_base = OTHER; note = 2'-O-methyluridine-3'-phosphate
  modified_base 4: mod_base = OTHER; note = 2'-O-methyladenosine-3'-phosphate
  modified_base 5: mod_base = OTHER; note = 2'-O-methyluridine-3'-phosphate
  modified_base 6: mod_base = OTHER; note = 2'-deoxy-2'-fluorouridine-3'-phosphate
  modified_base 7: mod_base = OTHER; note = 2'-O-methyluridine-3'-phosphate
  modified_base 8: mod_base = OTHER; note = 2'-O-methyluridine-3'-phosphate
  modified_base 9: mod_base = OTHER; note = 2'-O-methyluridine-3'-phosphate
  modified_base 10: mod_base = OTHER; note = 2'-O-methylguanosine-3'-phosphate
  modified_base 11: mod_base = OTHER; note = 2'-O-methyluridine-3'-phosphate
  modified_base 12: mod_base = OTHER; note = 2'-O-methyluridine-3'-phosphate
  modified_base 13: mod_base = OTHER; note = 2'-O-methyluridine-3'-phosphate
  modified_base 14: mod_base = OTHER; note = 2'-deoxy-2'-fluoroguanosine-3'-phosphate
  modified_base 15: mod_base = OTHER; note = 2'-O-methylguanosine-3'-phosphate
  modified_base 16: mod_base = OTHER; note = 2'-deoxy-2'-fluorouridine-3'-phosphate
  modified_base 17: mod_base = OTHER; note = 2'-O-methyladenosine-3'-phosphate
  modified_base 18: mod_base = OTHER; note = 2'-O-methyladenosine-3'-phosphate
  modified_base 19: mod_base = OTHER; note = 2'-O-methylcytidine-3'-phosphate
  modified_base 20: mod_base = OTHER; note = 2'-O-methyladenosine-3'-phosphate
  modified_base 21: mod_base = OTHER; note = 2'-O-methyladenosine-3'-phosphate
  modified_base 22: mod_base = OTHER; note = 2'-O-methyluridine-3'-phosphate
  modified_base 23: mod_base = OTHER; note = 2'-O-methyladenosine
tatatttttgtttggtaacaata

SEQ ID NO: 5581 - RNA, 23 nt, synthetic construct
  source 1..23: mol_type = other RNA
  modified_base 1: mod_base = OTHER; note = 2'-O-methyluridine-3'-phosphate 5'phosphate
  modified_base 2: mod_base = OTHER; note = 2'-deoxy-2'-fluoroguanosine-3'-phosphate
  modified_base 3: mod_base = OTHER; note = 2'-O-methyladenosine-3'-phosphate
  modified_base 4: mod_base = OTHER; note = 2'-O-methyluridine-3'-phosphate
  modified_base 5: mod_base = OTHER; note = 2'-O-methyladenosine-3'-phosphate
  modified_base 6: mod_base = OTHER; note = 2'-deoxy-2'-fluorouridine-3'-phosphate
  modified_base 7: mod_base = OTHER; note = 2'-O-methyluridine-3'-phosphate
  modified_base 8: mod_base = OTHER; note = 2'-O-methyluridine-3'-phosphate
  modified_base 9: mod_base = OTHER; note = 2'-O-methyluridine-3'-phosphate
  modified_base 10: mod_base = OTHER; note = 2'-O-methyluridine-3'-phosphate
  modified_base 11: mod_base = OTHER; note = 2'-O-methylguanosine-3'-phosphate
  modified_base 12: mod_base = OTHER; note = 2'-O-methyluridine-3'-phosphate
  modified_base 13: mod_base = OTHER; note = 2'-O-methyluridine-3'-phosphate
  modified_base 14: mod_base = OTHER; note = 2'-deoxy-2'-fluorouridine-3'-phosphate
  modified_base 15: mod_base = OTHER; note = 2'-O-methylguanosine-3'-phosphate
  modified_base 16: mod_base = OTHER; note = 2'-deoxy-2'-fluoroguanosine-3'-phosphate
  modified_base 17: mod_base = OTHER; note = 2'-O-methyluridine-3'-phosphate
  modified_base 18: mod_base = OTHER; note = 2'-O-methyladenosine-3'-phosphate
  modified_base 19: mod_base = OTHER; note = 2'-O-methyladenosine-3'-phosphate
  modified_base 20: mod_base = OTHER; note = 2'-O-methylcytidine-3'-phosphate
  modified_base 21: mod_base = OTHER; note = 2'-O-methyladenosine-3'-phosphate
  modified_base 22: mod_base = OTHER; note = 2'-O-methyladenosine-3'-phosphate
  modified_base 23: mod_base = OTHER; note = 2'-O-methyluridine
tgatatttttgtttggtaacaat

SEQ ID NO: 5582 - RNA, 23 nt, synthetic construct
  source 1..23: mol_type = other RNA
  modified_base 1: mod_base = OTHER; note = 2'-O-methyluridine-3'-phosphate 5'phosphate
  modified_base 2: mod_base = OTHER; note = 2'-deoxy-2'-fluoroguanosine-3'-phosphate
  modified_base 3: mod_base = OTHER; note = 2'-O-methylguanosine-3'-phosphate
  modified_base 4: mod_base = OTHER; note = 2'-O-methyladenosine-3'-phosphate
  modified_base 5: mod_base = OTHER; note = 2'-O-methyluridine-3'-phosphate
  modified_base 6: mod_base = OTHER; note = 2'-deoxy-2'-fluoroadenosine-3'-phosphate
  modified_base 7: mod_base = OTHER; note = 2'-O-methyluridine-3'-phosphate
  modified_base 8: mod_base = OTHER; note = 2'-O-methyluridine-3'-phosphate
  modified_base 9: mod_base = OTHER; note = 2'-O-methyluridine-3'-phosphate
  modified_base 10: mod_base = OTHER; note = 2'-O-methyluridine-3'-phosphate
  modified_base 11: mod_base = OTHER; note = 2'-O-methyluridine-3'-phosphate
  modified_base 12: mod_base = OTHER; note = 2'-O-methylguanosine-3'-phosphate
  modified_base 13: mod_base = OTHER; note = 2'-O-methyluridine-3'-phosphate
  modified_base 14: mod_base = OTHER; note = 2'-deoxy-2'-fluorouridine-3'-phosphate
  modified_base 15: mod_base = OTHER; note = 2'-O-methyluridine-3'-phosphate
  modified_base 16: mod_base = OTHER; note = 2'-deoxy-2'-fluoroguanosine-3'-phosphate
  modified_base 17: mod_base = OTHER; note = 2'-O-methylguanosine-3'-phosphate
  modified_base 18: mod_base = OTHER; note = 2'-O-methyluridine-3'-phosphate
  modified_base 19: mod_base = OTHER; note = 2'-O-methyladenosine-3'-phosphate
  modified_base 20: mod_base = OTHER; note = 2'-O-methyladenosine-3'-phosphate
  modified_base 21: mod_base = OTHER; note = 2'-O-methylcytidine-3'-phosphate
  modified_base 22: mod_base = OTHER; note = 2'-O-methyladenosine-3'-phosphate
  modified_base 23: mod_base = OTHER; note = 2'-O-methyladenosine
tggatatttttgtttggtaacaa

SEQ ID NO: 5583 - RNA, 23 nt, synthetic construct
  source 1..23: mol_type = other RNA
  modified_base 1: mod_base = OTHER; note = 2'-O-methyluridine-3'-phosphate 5'phosphate
  modified_base 2: mod_base = OTHER; note = 2'-deoxy-2'-fluorouridine-3'-phosphate
  modified_base 3: mod_base = OTHER; note = 2'-O-methylguanosine-3'-phosphate
  modified_base 4: mod_base = OTHER; note = 2'-O-methylguanosine-3'-phosphate
  modified_base 5: mod_base = OTHER; note = 2'-O-methyladenosine-3'-phosphate
  modified_base 6: mod_base = OTHER; note = 2'-deoxy-2'-fluorouridine-3'-phosphate
  modified_base 7: mod_base = OTHER; note = 2'-O-methyladenosine-3'-phosphate
  modified_base 8: mod_base = OTHER; note = 2'-O-methyluridine-3'-phosphate
  modified_base 9: mod_base = OTHER; note = 2'-O-methyluridine-3'-phosphate
  modified_base 10: mod_base = OTHER; note = 2'-O-methyluridine-3'-phosphate
  modified_base 11: mod_base = OTHER; note = 2'-O-methyluridine-3'-phosphate
  modified_base 12: mod_base = OTHER; note = 2'-O-methyluridine-3'-phosphate
  modified_base 13: mod_base = OTHER; note = 2'-O-methylguanosine-3'-phosphate
  modified_base 14: mod_base = OTHER; note = 2'-deoxy-2'-fluorouridine-3'-phosphate
  modified_base 15: mod_base = OTHER; note = 2'-O-methyluridine-3'-phosphate
  modified_base 16: mod_base = OTHER; note = 2'-deoxy-2'-fluorouridine-3'-phosphate
  modified_base 17: mod_base = OTHER; note = 2'-O-methylguanosine-3'-phosphate
  modified_base 18: mod_base = OTHER; note = 2'-O-methylguanosine-3'-phosphate
  modified_base 19: mod_base = OTHER; note = 2'-O-methyluridine-3'-phosphate
  modified_base 20: mod_base = OTHER; note = 2'-O-methyladenosine-3'-phosphate
  modified_base 21: mod_base = OTHER; note = 2'-O-methyladenosine-3'-phosphate
  modified_base 22: mod_base = OTHER; note = 2'-O-methylcytidine-3'-phosphate
  modified_base 23: mod_base = OTHER; note = 2'-O-methyladenosine
ttggatatttttgtttggtaaca

SEQ ID NO: 5584 - RNA, 23 nt, synthetic construct
  source 1..23: mol_type = other RNA
  modified_base 1: mod_base = OTHER; note = 2'-O-methyluridine-3'-phosphate 5'phosphate
  modified_base 2: mod_base = OTHER; note = 2'-deoxy-2'-fluoroadenosine-3'-phosphate
  modified_base 3: mod_base = OTHER; note = 2'-O-methyluridine-3'-phosphate
  modified_base 4: mod_base = OTHER; note = 2'-O-methylguanosine-3'-phosphate
  modified_base 5: mod_base = OTHER; note = 2'-O-methylguanosine-3'-phosphate
  modified_base 6: mod_base = OTHER; note = 2'-deoxy-2'-fluoroadenosine-3'-phosphate
  modified_base 7: mod_base = OTHER; note = 2'-O-methyluridine-3'-phosphate
  modified_base 8: mod_base = OTHER; note = 2'-O-methyladenosine-3'-phosphate
  modified_base 9: mod_base = OTHER; note = 2'-O-methyluridine-3'-phosphate
  modified_base 10: mod_base = OTHER; note = 2'-O-methyluridine-3'-phosphate
  modified_base 11: mod_base = OTHER; note = 2'-O-methyluridine-3'-phosphate
  modified_base 12: mod_base = OTHER; note = 2'-O-methyluridine-3'-phosphate
  modified_base 13: mod_base = OTHER; note = 2'-O-methyluridine-3'-phosphate
  modified_base 14: mod_base = OTHER; note = 2'-deoxy-2'-fluoroguanosine-3'-phosphate
  modified_base 15: mod_base = OTHER; note = 2'-O-methyluridine-3'-phosphate
  modified_base 16: mod_base = OTHER; note = 2'-deoxy-2'-fluorouridine-3'-phosphate
  modified_base 17: mod_base = OTHER; note = 2'-O-methyluridine-3'-phosphate
  modified_base 18: mod_base = OTHER; note = 2'-O-methylguanosine-3'-phosphate
  modified_base 19: mod_base = OTHER; note = 2'-O-methylguanosine-3'-phosphate
  modified_base 20: mod_base = OTHER; note = 2'-O-methyluridine-3'-phosphate
  modified_base 21: mod_base = OTHER; note = 2'-O-methyladenosine-3'-phosphate
  modified_base 22: mod_base = OTHER; note = 2'-O-methyladenosine-3'-phosphate
  modified_base 23: mod_base = OTHER; note = 2'-O-methylcytidine
tatggatatttttgtttggtaac

SEQ ID NO: 5585 - RNA, 23 nt, synthetic construct
  source 1..23: mol_type = other RNA
  modified_base 1: mod_base = OTHER; note = 2'-O-methyluridine-3'-phosphate 5'phosphate
  modified_base 2: mod_base = OTHER; note = 2'-deoxy-2'-fluoroguanosine-3'-phosphate
  modified_base 3: mod_base = OTHER; note = 2'-O-methyladenosine-3'-phosphate
  modified_base 4: mod_base = OTHER; note = 2'-O-methyladenosine-3'-phosphate
  modified_base 5: mod_base = OTHER; note = 2'-O-methyluridine-3'-phosphate
  modified_base 6: mod_base = OTHER; note = 2'-deoxy-2'-fluoroguanosine-3'-phosphate
  modified_base 7: mod_base = OTHER; note = 2'-O-methylguanosine-3'-phosphate
  modified_base 8: mod_base = OTHER; note = 2'-O-methyladenosine-3'-phosphate
  modified_base 9: mod_base = OTHER; note = 2'-O-methyluridine-3'-phosphate
  modified_base 10: mod_base = OTHER; note = 2'-O-methyladenosine-3'-phosphate
  modified_base 11: mod_base = OTHER; note = 2'-O-methyluridine-3'-phosphate
  modified_base 12: mod_base = OTHER; note = 2'-O-methyluridine-3'-phosphate
  modified_base 13: mod_base = OTHER; note = 2'-O-methyluridine-3'-phosphate
  modified_base 14: mod_base = OTHER; note = 2'-deoxy-2'-fluorouridine-3'-phosphate
  modified_base 15: mod_base = OTHER; note = 2'-O-methyluridine-3'-phosphate
  modified_base 16: mod_base = OTHER; note = 2'-deoxy-2'-fluoroguanosine-3'-phosphate
  modified_base 17: mod_base = OTHER; note = 2'-O-methyluridine-3'-phosphate
  modified_base 18: mod_base = OTHER; note = 2'-O-methyluridine-3'-phosphate
  modified_base 19: mod_base = OTHER; note = 2'-O-methyluridine-3'-phosphate
  modified_base 20: mod_base = OTHER; note = 2'-O-methylguanosine-3'-phosphate
  modified_base 21: mod_base = OTHER; note = 2'-O-methylguanosine-3'-phosphate
  modified_base 22: mod_base = OTHER; note = 2'-O-methyluridine-3'-phosphate
  modified_base 23: mod_base = OTHER; note = 2'-O-methyladenosine
tgaatggatatttttgtttggta

SEQ ID NO: 5586 - RNA, 23 nt, synthetic construct
  source 1..23: mol_type = other RNA
  modified_base 1: mod_base = OTHER; note = 2'-O-methyluridine-3'-phosphate 5'phosphate
  modified_base 2: mod_base = OTHER; note = 2'-deoxy-2'-fluorouridine-3'-phosphate
  modified_base 3: mod_base = OTHER; note = 2'-O-methylguanosine-3'-phosphate
  modified_base 4: mod_base = OTHER; note = 2'-O-methyladenosine-3'-phosphate
  modified_base 5: mod_base = OTHER; note = 2'-O-methyladenosine-3'-phosphate
  modified_base 6: mod_base = OTHER; note = 2'-deoxy-2'-fluorouridine-3'-phosphate
  modified_base 7: mod_base = OTHER; note = 2'-O-methylguanosine-3'-phosphate
  modified_base 8: mod_base = OTHER; note = 2'-O-methylguanosine-3'-phosphate
  modified_base 9: mod_base = OTHER; note = 2'-O-methyladenosine-3'-phosphate
  modified_base 10: mod_base = OTHER; note = 2'-O-methyluridine-3'-phosphate
  modified_base 11: mod_base = OTHER; note = 2'-O-methyladenosine-3'-phosphate
  modified_base 12: mod_base = OTHER; note = 2'-O-methyluridine-3'-phosphate
  modified_base 13: mod_base = OTHER; note = 2'-O-methyluridine-3'-phosphate
  modified_base 14: mod_base = OTHER; note = 2'-deoxy-2'-fluorouridine-3'-phosphate
  modified_base 15: mod_base = OTHER; note = 2'-O-methyluridine-3'-phosphate
  modified_base 16: mod_base = OTHER; note = 2'-deoxy-2'-fluorouridine-3'-phosphate
  modified_base 17: mod_base = OTHER; note = 2'-O-methylguanosine-3'-phosphate
  modified_base 18: mod_base = OTHER; note = 2'-O-methyluridine-3'-phosphate
  modified_base 19: mod_base = OTHER; note = 2'-O-methyluridine-3'-phosphate
  modified_base 20: mod_base = OTHER; note = 2'-O-methyluridine-3'-phosphate
  modified_base 21: mod_base = OTHER; note = 2'-O-methylguanosine-3'-phosphate
  modified_base 22: mod_base = OTHER; note = 2'-O-methylguanosine-3'-phosphate
  modified_base 23: mod_base = OTHER; note = 2'-O-methyluridine
ttgaatggatatttttgtttggt

SEQ ID NO: 5587 - RNA, 23 nt, synthetic construct
  source 1..23: mol_type = other RNA
  modified_base 1: mod_base = OTHER; note = 2'-O-methyluridine-3'-phosphate 5'phosphate
  modified_base 2: mod_base = OTHER; note = 2'-deoxy-2'-fluorouridine-3'-phosphate
  modified_base 3: mod_base = OTHER; note = 2'-O-methyluridine-3'-phosphate
  modified_base 4: mod_base = OTHER; note = 2'-O-methylguanosine-3'-phosphate
  modified_base 5: mod_base = OTHER; note = 2'-O-methyladenosine-3'-phosphate
  modified_base 6: mod_base = OTHER; note = 2'-deoxy-2'-fluoroadenosine-3'-phosphate
  modified_base 7: mod_base = OTHER; note = 2'-O-methyluridine-3'-phosphate
  modified_base 8: mod_base = OTHER; note = 2'-O-methylguanosine-3'-phosphate
  modified_base 9: mod_base = OTHER; note = 2'-O-methylguanosine-3'-phosphate
  modified_base 10: mod_base = OTHER; note = 2'-O-methyladenosine-3'-phosphate
  modified_base 11: mod_base = OTHER; note = 2'-O-methyluridine-3'-phosphate
  modified_base 12: mod_base = OTHER; note = 2'-O-methyladenosine-3'-phosphate
  modified_base 13: mod_base = OTHER; note = 2'-O-methyluridine-3'-phosphate
  modified_base 14: mod_base = OTHER; note = 2'-deoxy-2'-fluorouridine-3'-phosphate
  modified_base 15: mod_base = OTHER; note = 2'-O-methyluridine-3'-phosphate
  modified_base 16: mod_base = OTHER; note = 2'-deoxy-2'-fluorouridine-3'-phosphate
  modified_base 17: mod_base = OTHER; note = 2'-O-methyluridine-3'-phosphate
  modified_base 18: mod_base = OTHER; note = 2'-O-methylguanosine-3'-phosphate
  modified_base 19: mod_base = OTHER; note = 2'-O-methyluridine-3'-phosphate
  modified_base 20: mod_base = OTHER; note = 2'-O-methyluridine-3'-phosphate
  modified_base 21: mod_base = OTHER; note = 2'-O-methyluridine-3'-phosphate
  modified_base 22: mod_base = OTHER; note = 2'-O-methylguanosine-3'-phosphate
  modified_base 23: mod_base = OTHER; note = 2'-O-methylguanosine
tttgaatggatatttttgtttgg

SEQ ID NO: 5588 - RNA, 23 nt, synthetic construct
  source 1..23: mol_type = other RNA
  modified_base 1: mod_base = OTHER; note = 2'-O-methyluridine-3'-phosphate 5'phosphate
  modified_base 2: mod_base = OTHER; note = 2'-deoxy-2'-fluoroguanosine-3'-phosphate
  modified_base 3: mod_base = OTHER; note = 2'-O-methyluridine-3'-phosphate
  modified_base 4: mod_base = OTHER; note = 2'-O-methyladenosine-3'-phosphate
  modified_base 5: mod_base = OTHER; note = 2'-O-methyluridine-3'-phosphate
  modified_base 6: mod_base = OTHER; note = 2'-deoxy-2'-fluorouridine-3'-phosphate
  modified_base 7: mod_base = OTHER; note = 2'-O-methyluridine-3'-phosphate
  modified_base 8: mod_base = OTHER; note = 2'-O-methyluridine-3'-phosphate
  modified_base 9: mod_base = OTHER; note = 2'-O-methylguanosine-3'-phosphate
  modified_base 10: mod_base = OTHER; note = 2'-O-methyladenosine-3'-phosphate
  modified_base 11: mod_base = OTHER; note = 2'-O-methyladenosine-3'-phosphate
  modified_base 12: mod_base = OTHER; note = 2'-O-methyluridine-3'-phosphate
  modified_base 13: mod_base = OTHER; note = 2'-O-methylguanosine-3'-phosphate
  modified_base 14: mod_base = OTHER; note = 2'-deoxy-2'-fluoroguanosine-3'-phosphate
  modified_base 15: mod_base = OTHER; note = 2'-O-methyladenosine-3'-phosphate
  modified_base 16: mod_base = OTHER; note = 2'-deoxy-2'-fluorouridine-3'-phosphate
  modified_base 17: mod_base = OTHER; note = 2'-O-methyladenosine-3'-phosphate
  modified_base 18: mod_base = OTHER; note = 2'-O-methyluridine-3'-phosphate
  modified_base 19: mod_base = OTHER; note = 2'-O-methyluridine-3'-phosphate
  modified_base 20: mod_base = OTHER; note = 2'-O-methyluridine-3'-phosphate
  modified_base 21: mod_base = OTHER; note = 2'-O-methyluridine-3'-phosphate
  modified_base 22: mod_base = OTHER; note = 2'-O-methyluridine-3'-phosphate
  modified_base 23: mod_base = OTHER; note = 2'-O-methylguanosine
tgtattttgaatggatatttttg

SEQ ID NO: 5589 - RNA, 23 nt, synthetic construct
  source 1..23: mol_type = other RNA
  modified_base 1: mod_base = OTHER; note = 2'-O-methyluridine-3'-phosphate 5'phosphate
  modified_base 2: mod_base = OTHER; note = 2'-deoxy-2'-fluorouridine-3'-phosphate
  modified_base 3: mod_base = OTHER; note = 2'-O-methylguanosine-3'-phosphate
  modified_base 4: mod_base = OTHER; note = 2'-O-methyluridine-3'-phosphate
  modified_base 5: mod_base = OTHER; note = 2'-O-methyladenosine-3'-phosphate
  modified_base 6: mod_base = OTHER; note = 2'-deoxy-2'-fluorouridine-3'-phosphate
  modified_base 7: mod_base = OTHER; note = 2'-O-methyluridine-3'-phosphate
  modified_base 8: mod_base = OTHER; note = 2'-O-methyluridine-3'-phosphate
  modified_base 9: mod_base = OTHER; note = 2'-O-methyluridine-3'-phosphate
  modified_base 10: mod_base = OTHER; note = 2'-O-methylguanosine-3'-phosphate
  modified_base 11: mod_base = OTHER; note = 2'-O-methyladenosine-3'-phosphate
  modified_base 12: mod_base = OTHER; note = 2'-O-methyladenosine-3'-phosphate
  modified_base 13: mod_base = OTHER; note = 2'-O-methyluridine-3'-phosphate
  modified_base 14: mod_base = OTHER; note = 2'-deoxy-2'-fluoroguanosine-3'-phosphate
  modified_base 15: mod_base = OTHER; note = 2'-O-methylguanosine-3'-phosphate
  modified_base 16: mod_base = OTHER; note = 2'-deoxy-2'-fluoroadenosine-3'-phosphate
  modified_base 17: mod_base = OTHER; note = 2'-O-methyluridine-3'-phosphate
  modified_base 18: mod_base = OTHER; note = 2'-O-methyladenosine-3'-phosphate
  modified_base 19: mod_base = OTHER; note = 2'-O-methyluridine-3'-phosphate
  modified_base 20: mod_base = OTHER; note = 2'-O-methyluridine-3'-phosphate
  modified_base 21: mod_base = OTHER; note = 2'-O-methyluridine-3'-phosphate
  modified_base 22: mod_base = OTHER; note = 2'-O-methyluridine-3'-phosphate
  modified_base 23: mod_base = OTHER; note = 2'-O-methyluridine
ttgtattttgaatggatattttt

SEQ ID NO: 5590 - RNA, 23 nt, synthetic construct
  source 1..23: mol_type = other RNA
  modified_base 1: mod_base = OTHER; note = 2'-O-methyluridine-3'-phosphate 5'phosphate
  modified_base 2: mod_base = OTHER; note = 2'-deoxy-2'-fluorouridine-3'-phosphate
  modified_base 3: mod_base = OTHER; note = 2'-O-methyluridine-3'-phosphate
  modified_base 4: mod_base = OTHER; note = 2'-O-methylguanosine-3'-phosphate
  modified_base 5: mod_base = OTHER; note = 2'-O-methyluridine-3'-phosphate
  modified_base 6: mod_base = OTHER; note = 2'-deoxy-2'-fluoroadenosine-3'-phosphate
  modified_base 7: mod_base = OTHER; note = 2'-O-methyluridine-3'-phosphate
  modified_base 8: mod_base = OTHER; note = 2'-O-methyluridine-3'-phosphate
  modified_base 9: mod_base = OTHER; note = 2'-O-methyluridine-3'-phosphate
  modified_base 10: mod_base = OTHER; note = 2'-O-methyluridine-3'-phosphate
  modified_base 11: mod_base = OTHER; note = 2'-O-methylguanosine-3'-phosphate
  modified_base 12: mod_base = OTHER; note = 2'-O-methyladenosine-3'-phosphate
  modified_base 13: mod_base = OTHER; note = 2'-O-methyladenosine-3'-phosphate
  modified_base 14: mod_base = OTHER; note = 2'-deoxy-2'-fluorouridine-3'-phosphate
  modified_base 15: mod_base = OTHER; note = 2'-O-methylguanosine-3'-phosphate
  modified_base 16: mod_base = OTHER; note = 2'-deoxy-2'-fluoroguanosine-3'-phosphate
  modified_base 17: mod_base = OTHER; note = 2'-O-methyladenosine-3'-phosphate
  modified_base 18: mod_base = OTHER; note = 2'-O-methyluridine-3'-phosphate
  modified_base 19: mod_base = OTHER; note = 2'-O-methyladenosine-3'-phosphate
  modified_base 20: mod_base = OTHER; note = 2'-O-methyluridine-3'-phosphate
  modified_base 21: mod_base = OTHER; note = 2'-O-methyluridine-3'-phosphate
  modified_base 22: mod_base = OTHER; note = 2'-O-methyluridine-3'-phosphate
  modified_base 23: mod_base = OTHER; note = 2'-O-methyluridine
tttgtattttgaatggatatttt

SEQ ID NO: 5591 - RNA, 23 nt, synthetic construct
  source 1..23: mol_type = other RNA
  modified_base 1: mod_base = OTHER; note = 2'-O-methyluridine-3'-phosphate 5'phosphate
  modified_base 2: mod_base = OTHER; note = 2'-deoxy-2'-fluoroadenosine-3'-phosphate
  modified_base 3: mod_base = OTHER; note = 2'-O-methyluridine-3'-phosphate
  modified_base 4: mod_base = OTHER; note = 2'-O-methyluridine-3'-phosphate
  modified_base 5: mod_base = OTHER; note = 2'-O-methylguanosine-3'-phosphate
  modified_base 6: mod_base = OTHER; note = 2'-deoxy-2'-fluorouridine-3'-phosphate
  modified_base 7: mod_base = OTHER; note = 2'-O-methyladenosine-3'-phosphate
  modified_base 8: mod_base = OTHER; note = 2'-O-methyluridine-3'-phosphate
  modified_base 9: mod_base = OTHER; note = 2'-O-methyluridine-3'-phosphate
  modified_base 10: mod_base = OTHER; note = 2'-O-methyluridine-3'-phosphate
  modified_base 11: mod_base = OTHER; note = 2'-O-methyluridine-3'-phosphate
  modified_base 12: mod_base = OTHER; note = 2'-O-methylguanosine-3'-phosphate
  modified_base 13: mod_base = OTHER; note = 2'-O-methyladenosine-3'-phosphate
  modified_base 14: mod_base = OTHER; note = 2'-deoxy-2'-fluoroadenosine-3'-phosphate
  modified_base 15: mod_base = OTHER; note = 2'-O-methyluridine-3'-phosphate
  modified_base 16: mod_base = OTHER; note = 2'-deoxy-2'-fluoroguanosine-3'-phosphate
  modified_base 17: mod_base = OTHER; note = 2'-O-methylguanosine-3'-phosphate
  modified_base 18: mod_base = OTHER; note = 2'-O-methyladenosine-3'-phosphate
  modified_base 19: mod_base = OTHER; note = 2'-O-methyluridine-3'-phosphate
  modified_base 20: mod_base = OTHER; note = 2'-O-methyladenosine-3'-phosphate
  modified_base 21: mod_base = OTHER; note = 2'-O-methyluridine-3'-phosphate
  modified_base 22: mod_base = OTHER; note = 2'-O-methyluridine-3'-phosphate
  modified_base 23: mod_base = OTHER; note = 2'-O-methyluridine
tattgtattttgaatggatattt

SEQ ID NO: 5592 - RNA, 23 nt, synthetic construct
  source 1..23: mol_type = other RNA
  modified_base 1: mod_base = OTHER; note = 2'-O-methyluridine-3'-phosphate 5'phosphate
  modified_base 2: mod_base = OTHER; note = 2'-deoxy-2'-fluoroadenosine-3'-phosphate
  modified_base 3: mod_base = OTHER; note = 2'-O-methyladenosine-3'-phosphate
  modified_base 4: mod_base = OTHER; note = 2'-O-methyluridine-3'-phosphate
  modified_base 5: mod_base = OTHER; note = 2'-O-methyluridine-3'-phosphate
  modified_base 6: mod_base = OTHER; note = 2'-deoxy-2'-fluoroguanosine-3'-phosphate
  modified_base 7: mod_base = OTHER; note = 2'-O-methyluridine-3'-phosphate
  modified_base 8: mod_base = OTHER; note = 2'-O-methyladenosine-3'-phosphate
  modified_base 9: mod_base = OTHER; note = 2'-O-methyluridine-3'-phosphate
  modified_base 10: mod_base = OTHER; note = 2'-O-methyluridine-3'-phosphate
  modified_base 11: mod_base = OTHER; note = 2'-O-methyluridine-3'-phosphate
  modified_base 12: mod_base = OTHER; note = 2'-O-methyluridine-3'-phosphate
  modified_base 13: mod_base = OTHER; note = 2'-O-methylguanosine-3'-phosphate
  modified_base 14: mod_base = OTHER; note = 2'-deoxy-2'-fluoroadenosine-3'-phosphate
  modified_base 15: mod_base = OTHER; note = 2'-O-methyladenosine-3'-phosphate
  modified_base 16: mod_base = OTHER; note = 2'-deoxy-2'-fluorouridine-3'-phosphate
  modified_base 17: mod_base = OTHER; note = 2'-O-methylguanosine-3'-phosphate
  modified_base 18: mod_base = OTHER; note = 2'-O-methylguanosine-3'-phosphate
  modified_base 19: mod_base = OTHER; note = 2'-O-methyladenosine-3'-phosphate
  modified_base 20: mod_base = OTHER; note = 2'-O-methyluridine-3'-phosphate
  modified_base 21: mod_base = OTHER; note = 2'-O-methyladenosine-3'-phosphate
  modified_base 22: mod_base = OTHER; note = 2'-O-methyluridine-3'-phosphate
  modified_base 23: mod_base = OTHER; note = 2'-O-methyluridine
taattgtattttgaatggatatt

SEQ ID NO: 5593 - RNA, 23 nt, synthetic construct
  source 1..23: mol_type = other RNA
  modified_base 1: mod_base = OTHER; note = 2'-O-methyluridine-3'-phosphate 5'phosphate
  modified_base 2: mod_base = OTHER; note = 2'-deoxy-2'-fluoroadenosine-3'-phosphate
  modified_base 3: mod_base = OTHER; note = 2'-O-methyladenosine-3'-phosphate
  modified_base 4: mod_base = OTHER; note = 2'-O-methyladenosine-3'-phosphate
  modified_base 5: mod_base = OTHER; note = 2'-O-methyluridine-3'-phosphate
  modified_base 6: mod_base = OTHER; note = 2'-deoxy-2'-fluorouridine-3'-phosphate
  modified_base 7: mod_base = OTHER; note = 2'-O-methylguanosine-3'-phosphate
  modified_base 8: mod_base = OTHER; note = 2'-O-methyluridine-3'-phosphate
  modified_base 9: mod_base = OTHER; note = 2'-O-methyladenosine-3'-phosphate
  modified_base 10: mod_base = OTHER; note = 2'-O-methyluridine-3'-phosphate
  modified_base 11: mod_base = OTHER; note = 2'-O-methyluridine-3'-phosphate
  modified_base 12: mod_base = OTHER; note = 2'-O-methyluridine-3'-phosphate
  modified_base 13: mod_base = OTHER; note = 2'-O-methyluridine-3'-phosphate
  modified_base 14: mod_base = OTHER; note = 2'-deoxy-2'-fluoroguanosine-3'-phosphate
  modified_base 15: mod_base = OTHER; note = 2'-O-methyladenosine-3'-phosphate
  modified_base 16: mod_base = OTHER; note = 2'-deoxy-2'-fluoroadenosine-3'-phosphate
  modified_base 17: mod_base = OTHER; note = 2'-O-methyluridine-3'-phosphate
  modified_base 18: mod_base = OTHER; note = 2'-O-methylguanosine-3'-phosphate
  modified_base 19: mod_base = OTHER; note = 2'-O-methylguanosine-3'-phosphate
  modified_base 20: mod_base = OTHER; note = 2'-O-methyladenosine-3'-phosphate
  modified_base 21: mod_base = OTHER; note = 2'-O-methyluridine-3'-phosphate
  modified_base 22: mod_base = OTHER; note = 2'-O-methyladenosine-3'-phosphate
  modified_base 23: mod_base = OTHER; note = 2'-O-methyluridine
taaattgtattttgaatggatat

SEQ ID NO: 5594 - RNA, 23 nt, synthetic construct
  source 1..23: mol_type = other RNA
  modified_base 1: mod_base = OTHER; note = 2'-O-methyluridine-3'-phosphate 5'phosphate
  modified_base 2: mod_base = OTHER; note = 2'-deoxy-2'-fluorouridine-3'-phosphate
  modified_base 3: mod_base = OTHER; note = 2'-O-methyladenosine-3'-phosphate
  modified_base 4: mod_base = OTHER; note = 2'-O-methyladenosine-3'-phosphate
  modified_base 5: mod_base = OTHER; note = 2'-O-methyladenosine-3'-phosphate
  modified_base 6: mod_base = OTHER; note = 2'-deoxy-2'-fluorouridine-3'-phosphate
  modified_base 7: mod_base = OTHER; note = 2'-O-methyluridine-3'-phosphate
  modified_base 8: mod_base = OTHER; note = 2'-O-methylguanosine-3'-phosphate
  modified_base 9: mod_base = OTHER; note = 2'-O-methyluridine-3'-phosphate
  modified_base 10: mod_base = OTHER; note = 2'-O-methyladenosine-3'-phosphate
  modified_base 11: mod_base = OTHER; note = 2'-O-methyluridine-3'-phosphate
  modified_base 12: mod_base = OTHER; note = 2'-O-methyluridine-3'-phosphate
  modified_base 13: mod_base = OTHER; note = 2'-O-methyluridine-3'-phosphate
  modified_base 14: mod_base = OTHER; note = 2'-deoxy-2'-fluorouridine-3'-phosphate
  modified_base 15: mod_base = OTHER; note = 2'-O-methylguanosine-3'-phosphate
  modified_base 16: mod_base = OTHER; note = 2'-deoxy-2'-fluoroadenosine-3'-phosphate
  modified_base 17: mod_base = OTHER; note = 2'-O-methyladenosine-3'-phosphate
  modified_base 18: mod_base = OTHER; note = 2'-O-methyluridine-3'-phosphate
  modified_base 19: mod_base = OTHER; note = 2'-O-methylguanosine-3'-phosphate
  modified_base 20: mod_base = OTHER; note = 2'-O-methylguanosine-3'-phosphate
  modified_base 21: mod_base = OTHER; note = 2'-O-methyladenosine-3'-phosphate
  modified_base 22: mod_base = OTHER; note = 2'-O-methyluridine-3'-phosphate
  modified_base 23: mod_base = OTHER; note = 2'-O-methyladenosine
ttaaattgtattttgaatggata

SEQ ID NO: 5595 - RNA, 23 nt, synthetic construct
  source 1..23: mol_type = other RNA
  modified_base 1: mod_base = OTHER; note = 2'-O-methyluridine-3'-phosphate 5'phosphate
  modified_base 2: mod_base = OTHER; note = 2'-deoxy-2'-fluorouridine-3'-phosphate
  modified_base 3: mod_base = OTHER; note = 2'-O-methyluridine-3'-phosphate
  modified_base 4: mod_base = OTHER; note = 2'-O-methyladenosine-3'-phosphate
  modified_base 5: mod_base = OTHER; note = 2'-O-methyladenosine-3'-phosphate
  modified_base 6: mod_base = OTHER; note = 2'-deoxy-2'-fluoroadenosine-3'-phosphate
  modified_base 7: mod_base = OTHER; note = 2'-O-methyluridine-3'-phosphate
  modified_base 8: mod_base = OTHER; note = 2'-O-methyluridine-3'-phosphate
  modified_base 9: mod_base = OTHER; note = 2'-O-methylguanosine-3'-phosphate
  modified_base 10: mod_base = OTHER; note = 2'-O-methyluridine-3'-phosphate
  modified_base 11: mod_base = OTHER; note = 2'-O-methyladenosine-3'-phosphate
  modified_base 12: mod_base = OTHER; note = 2'-O-methyluridine-3'-phosphate
  modified_base 13: mod_base = OTHER; note = 2'-O-methyluridine-3'-phosphate
  modified_base 14: mod_base = OTHER; note = 2'-deoxy-2'-fluorouridine-3'-phosphate
  modified_base 15: mod_base = OTHER; note = 2'-O-methyluridine-3'-phosphate
  modified_base 16: mod_base = OTHER; note = 2'-deoxy-2'-fluoroguanosine-3'-phosphate
  modified_base 17: mod_base = OTHER; note = 2'-O-methyladenosine-3'-phosphate
  modified_base 18: mod_base = OTHER; note = 2'-O-methyladenosine-3'-phosphate
  modified_base 19: mod_base = OTHER; note = 2'-O-methyluridine-3'-phosphate
  modified_base 20: mod_base = OTHER; note = 2'-O-methylguanosine-3'-phosphate
  modified_base 21: mod_base = OTHER; note = 2'-O-methylguanosine-3'-phosphate
  modified_base 22: mod_base = OTHER; note = 2'-O-methyladenosine-3'-phosphate
  modified_base 23: mod_base = OTHER; note = 2'-O-methyluridine
tttaaattgtattttgaatggat

SEQ ID NO: 5596 - RNA, 23 nt, synthetic construct
  source 1..23: mol_type = other RNA
  modified_base 1: mod_base = OTHER; note = 2'-O-methyluridine-3'-phosphate 5'phosphate
  modified_base 2: mod_base = OTHER; note = 2'-deoxy-2'-fluoroguanosine-3'-phosphate
  modified_base 3: mod_base = OTHER; note = 2'-O-methyluridine-3'-phosphate
  modified_base 4: mod_base = OTHER; note = 2'-O-methyluridine-3'-phosphate
  modified_base 5: mod_base = OTHER; note = 2'-O-methyladenosine-3'-phosphate
  modified_base 6: mod_base = OTHER; note = 2'-deoxy-2'-fluoroadenosine-3'-phosphate
  modified_base 7: mod_base = OTHER; note = 2'-O-methyladenosine-3'-phosphate
  modified_base 8: mod_base = OTHER; note = 2'-O-methyluridine-3'-phosphate
  modified_base 9: mod_base = OTHER; note = 2'-O-methyluridine-3'-phosphate
  modified_base 10: mod_base = OTHER; note = 2'-O-methylguanosine-3'-phosphate
  modified_base 11: mod_base = OTHER; note = 2'-O-methyluridine-3'-phosphate
  modified_base 12: mod_base = OTHER; note = 2'-O-methyladenosine-3'-phosphate
  modified_base 13: mod_base = OTHER; note = 2'-O-methyluridine-3'-phosphate
  modified_base 14: mod_base = OTHER; note = 2'-deoxy-2'-fluorouridine-3'-phosphate
  modified_base 15: mod_base = OTHER; note = 2'-O-methyluridine-3'-phosphate
  modified_base 16: mod_base = OTHER; note = 2'-deoxy-2'-fluorouridine-3'-phosphate
  modified_base 17: mod_base = OTHER; note = 2'-O-methylguanosine-3'-phosphate
  modified_base 18: mod_base = OTHER; note = 2'-O-methyladenosine-3'-phosphate
  modified_base 19: mod_base = OTHER; note = 2'-O-methyladenosine-3'-phosphate
  modified_base 20: mod_base = OTHER; note = 2'-O-methyluridine-3'-phosphate
  modified_base 21: mod_base = OTHER; note = 2'-O-methylguanosine-3'-phosphate
  modified_base 22: mod_base = OTHER; note = 2'-O-methylguanosine-3'-phosphate
  modified_base 23: mod_base = OTHER; note = 2'-O-methyladenosine
tgttaaattgtattttgaatgga

SEQ ID NO: 5597 - RNA, 23 nt, synthetic construct
  source 1..23: mol_type = other RNA
  modified_base 1: mod_base = OTHER; note = 2'-O-methyluridine-3'-phosphate 5'phosphate
  modified_base 2: mod_base = OTHER; note = 2'-deoxy-2'-fluorouridine-3'-phosphate
  modified_base 3: mod_base = OTHER; note = 2'-O-methylguanosine-3'-phosphate
  modified_base 4: mod_base = OTHER; note = 2'-O-methyluridine-3'-phosphate
  modified_base 5: mod_base = OTHER; note = 2'-O-methyluridine-3'-phosphate
  modified_base 6: mod_base = OTHER; note = 2'-deoxy-2'-fluoroadenosine-3'-phosphate
  modified_base 7: mod_base = OTHER; note = 2'-O-methyladenosine-3'-phosphate
  modified_base 8: mod_base = OTHER; note = 2'-O-methyladenosine-3'-phosphate
  modified_base 9: mod_base = OTHER; note = 2'-O-methyluridine-3'-phosphate
  modified_base 10: mod_base = OTHER; note = 2'-O-methyluridine-3'-phosphate
  modified_base 11: mod_base = OTHER; note = 2'-O-methylguanosine-3'-phosphate
  modified_base 12: mod_base = OTHER; note = 2'-O-methyluridine-3'-phosphate
  modified_base 13: mod_base = OTHER; note = 2'-O-methyladenosine-3'-phosphate
  modified_base 14: mod_base = OTHER; note = 2'-deoxy-2'-fluorouridine-3'-phosphate
  modified_base 15: mod_base = OTHER; note = 2'-O-methyluridine-3'-phosphate
  modified_base 16: mod_base = OTHER; note = 2'-deoxy-2'-fluorouridine-3'-phosphate
  modified_base 17: mod_base = OTHER; note = 2'-O-methyluridine-3'-phosphate
  modified_base 18: mod_base = OTHER; note = 2'-O-methylguanosine-3'-phosphate
  modified_base 19: mod_base = OTHER; note = 2'-O-methyladenosine-3'-phosphate
  modified_base 20: mod_base = OTHER; note = 2'-O-methyladenosine-3'-phosphate
  modified_base 21: mod_base = OTHER; note = 2'-O-methyluridine-3'-phosphate
  modified_base 22: mod_base = OTHER; note = 2'-O-methylguanosine-3'-phosphate
  modified_base 23: mod_base = OTHER; note = 2'-O-methylguanosine
ttgttaaattgtattttgaatgg

SEQ ID NO: 5598 - RNA, 23 nt, synthetic construct
  source 1..23: mol_type = other RNA
  modified_base 1: mod_base = OTHER; note = 2'-O-methyluridine-3'-phosphate 5'phosphate
  modified_base 2: mod_base = OTHER; note = 2'-deoxy-2'-fluorouridine-3'-phosphate
  modified_base 3: mod_base = OTHER; note = 2'-O-methyluridine-3'-phosphate
  modified_base 4: mod_base = OTHER; note = 2'-O-methylguanosine-3'-phosphate
  modified_base 5: mod_base = OTHER; note = 2'-O-methyluridine-3'-phosphate
  modified_base 6: mod_base = OTHER; note = 2'-deoxy-2'-fluorouridine-3'-phosphate
  modified_base 7: mod_base = OTHER; note = 2'-O-methyladenosine-3'-phosphate
  modified_base 8: mod_base = OTHER; note = 2'-O-methyladenosine-3'-phosphate
  modified_base 9: mod_base = OTHER; note = 2'-O-methyladenosine-3'-phosphate
  modified_base 10: mod_base = OTHER; note = 2'-O-methyluridine-3'-phosphate
  modified_base 11: mod_base = OTHER; note = 2'-O-methyluridine-3'-phosphate
  modified_base 12: mod_base = OTHER; note = 2'-O-methylguanosine-3'-phosphate
  modified_base 13: mod_base = OTHER; note = 2'-O-methyluridine-3'-phosphate
  modified_base 14: mod_base = OTHER; note = 2'-deoxy-2'-fluoroadenosine-3'-phosphate
  modified_base 15: mod_base = OTHER; note = 2'-O-methyluridine-3'-phosphate
  modified_base 16: mod_base = OTHER; note = 2'-deoxy-2'-fluorouridine-3'-phosphate
  modified_base 17: mod_base = OTHER; note = 2'-O-methyluridine-3'-phosphate
  modified_base 18: mod_base = OTHER; note = 2'-O-methyluridine-3'-phosphate
  modified_base 19: mod_base = OTHER; note = 2'-O-methylguanosine-3'-phosphate
  modified_base 20: mod_base = OTHER; note = 2'-O-methyladenosine-3'-phosphate
  modified_base 21: mod_base = OTHER; note = 2'-O-methyladenosine-3'-phosphate
  modified_base 22: mod_base = OTHER; note = 2'-O-methyluridine-3'-phosphate
  modified_base 23: mod_base = OTHER; note = 2'-O-methylguanosine
tttgttaaattgtattttgaatg

SEQ ID NO: 5599 - RNA, 23 nt, synthetic construct
  source 1..23: mol_type = other RNA
  modified_base 1: mod_base = OTHER; note = 2'-O-methyluridine-3'-phosphate 5'phosphate
  modified_base 2: mod_base = OTHER; note = 2'-deoxy-2'-fluoroadenosine-3'-phosphate
  modified_base 3: mod_base = OTHER; note = 2'-O-methyluridine-3'-phosphate
  modified_base 4: mod_base = OTHER; note = 2'-O-methyluridine-3'-phosphate
  modified_base 5: mod_base = OTHER; note = 2'-O-methylguanosine-3'-phosphate
  modified_base 6: mod_base = OTHER; note = 2'-deoxy-2'-fluorouridine-3'-phosphate
  modified_base 7: mod_base = OTHER; note = 2'-O-methyluridine-3'-phosphate
  modified_base 8: mod_base = OTHER; note = 2'-O-methyladenosine-3'-phosphate
  modified_base 9: mod_base = OTHER; note = 2'-O-methyladenosine-3'-phosphate
  modified_base 10: mod_base = OTHER; note = 2'-O-methyladenosine-3'-phosphate
  modified_base 11: mod_base = OTHER; note = 2'-O-methyluridine-3'-phosphate
  modified_base 12: mod_base = OTHER; note = 2'-O-methyluridine-3'-phosphate
  modified_base 13: mod_base = OTHER; note = 2'-O-methylguanosine-3'-phosphate
  modified_base 14: mod_base = OTHER; note = 2'-deoxy-2'-fluorouridine-3'-phosphate
  modified_base 15: mod_base = OTHER; note = 2'-O-methyladenosine-3'-phosphate
  modified_base 16: mod_base = OTHER; note = 2'-deoxy-2'-fluorouridine-3'-phosphate
  modified_base 17: mod_base = OTHER; note = 2'-O-methyluridine-3'-phosphate
  modified_base 18: mod_base = OTHER; note = 2'-O-methyluridine-3'-phosphate
  modified_base 19: mod_base = OTHER; note = 2'-O-methyluridine-3'-phosphate
  modified_base 20: mod_base = OTHER; note = 2'-O-methylguanosine-3'-phosphate
  modified_base 21: mod_base = OTHER; note = 2'-O-methyladenosine-3'-phosphate
  modified_base 22: mod_base = OTHER; note = 2'-O-methyladenosine-3'-phosphate
  modified_base 23: mod_base = OTHER; note = 2'-O-methyluridine
tattgttaaattgtattttgaat

SEQ ID NO: 5600 - RNA, 23 nt, synthetic construct
  source 1..23: mol_type = other RNA
  modified_base 1: mod_base = OTHER; note = 2'-O-methyluridine-3'-phosphate 5'phosphate
  modified_base 2: mod_base = OTHER; note = 2'-deoxy-2'-fluoroadenosine-3'-phosphate
  modified_base 3: mod_base = OTHER; note = 2'-O-methylcytidine-3'-phosphate
  modified_base 4: mod_base = OTHER; note = 2'-O-methyluridine-3'-phosphate
  modified_base 5: mod_base = OTHER; note = 2'-O-methylguanosine-3'-phosphate
  modified_base 6: mod_base = OTHER; note = 2'-deoxy-2'-fluorouridine-3'-phosphate
  modified_base 7: mod_base = OTHER; note = 2'-O-methyluridine-3'-phosphate
  modified_base 8: mod_base = OTHER; note = 2'-O-methylguanosine-3'-phosphate
  modified_base 9: mod_base = OTHER; note = 2'-O-methylcytidine-3'-phosphate
  modified_base 10: mod_base = OTHER; note = 2'-O-methyladenosine-3'-phosphate
  modified_base 11: mod_base = OTHER; note = 2'-O-methyluridine-3'-phosphate
  modified_base 12: mod_base = OTHER; note = 2'-O-methyluridine-3'-phosphate
  modified_base 13: mod_base = OTHER; note = 2'-O-methylguanosine-3'-phosphate
  modified_base 14: mod_base = OTHER; note = 2'-deoxy-2'-fluorouridine-3'-phosphate
  modified_base 15: mod_base = OTHER; note = 2'-O-methyluridine-3'-phosphate
  modified_base 16: mod_base = OTHER; note = 2'-deoxy-2'-fluoroadenosine-3'-phosphate
  modified_base 17: mod_base = OTHER; note = 2'-O-methyladenosine-3'-phosphate
  modified_base 18: mod_base = OTHER; note = 2'-O-methyladenosine-3'-phosphate
  modified_base 19: mod_base = OTHER; note = 2'-O-methyluridine-3'-phosphate
  modified_base 20: mod_base = OTHER; note = 2'-O-methyluridine-3'-phosphate
  modified_base 21: mod_base = OTHER; note = 2'-O-methylguanosine-3'-phosphate
  modified_base 22: mod_base = OTHER; note = 2'-O-methyluridine-3'-phosphate
  modified_base 23: mod_base = OTHER; note = 2'-O-methyladenosine
tactgttgcattgttaaattgta

SEQ ID NO: 5601 - RNA, 23 nt, synthetic construct
  source 1..23: mol_type = other RNA
  modified_base 1: mod_base = OTHER; note = 2'-O-methyluridine-3'-phosphate 5'phosphate
  modified_base 2: mod_base = OTHER; note = 2'-deoxy-2'-fluoroadenosine-3'-phosphate
  modified_base 3: mod_base = OTHER; note = 2'-O-methyluridine-3'-phosphate
  modified_base 4: mod_base = OTHER; note = 2'-O-methyluridine-3'-phosphate
  modified_base 5: mod_base = OTHER; note = 2'-O-methyluridine-3'-phosphate
  modified_base 6: mod_base = OTHER; note = 2'-deoxy-2'-fluorocytidine-3'-phosphate
  modified_base 7: mod_base = OTHER; note = 2'-O-methyluridine-3'-phosphate
  modified_base 8: mod_base = OTHER; note = 2'-O-methylcytidine-3'-phosphate
  modified_base 9: mod_base = OTHER; note = 2'-O-methyluridine-3'-phosphate
  modified_base 10: mod_base = OTHER; note = 2'-O-methylguanosine-3'-phosphate
  modified_base 11: mod_base = OTHER; note = 2'-O-methylcytidine-3'-phosphate
  modified_base 12: mod_base = OTHER; note = 2'-O-methyluridine-3'-phosphate
  modified_base 13: mod_base = OTHER; note = 2'-O-methylguanosine-3'-phosphate
  modified_base 14: mod_base = OTHER; note = 2'-deoxy-2'-fluorouridine-3'-phosphate
  modified_base 15: mod_base = OTHER; note = 2'-O-methyladenosine-3'-phosphate
  modified_base 16: mod_base = OTHER; note = 2'-deoxy-2'-fluoroadenosine-3'-phosphate
  modified_base 17: mod_base = OTHER; note = 2'-O-methylguanosine-3'-phosphate
  modified_base 18: mod_base = OTHER; note = 2'-O-methyladenosine-3'-phosphate
  modified_base 19: mod_base = OTHER; note = 2'-O-methyluridine-3'-phosphate
  modified_base 20: mod_base = OTHER; note = 2'-O-methylguanosine-3'-phosphate
  modified_base 21: mod_base = OTHER; note = 2'-O-methyladenosine-3'-phosphate
  modified_base 22: mod_base = OTHER; note = 2'-O-methylcytidine-3'-phosphate
  modified_base 23: mod_base = OTHER; note = 2'-O-methyluridine
tatttctctgctgtaagatgact

SEQ ID NO: 5602 - RNA, 23 nt, synthetic construct
  source 1..23: mol_type = other RNA
  modified_base 1: mod_base = OTHER; note = 2'-O-methyluridine-3'-phosphate 5'phosphate
  modified_base 2: mod_base = OTHER; note = 2'-deoxy-2'-fluorocytidine-3'-phosphate
  modified_base 3: mod_base = OTHER; note = 2'-O-methyladenosine-3'-phosphate
  modified_base 4: mod_base = OTHER; note = 2'-O-methyluridine-3'-phosphate
  modified_base 5: mod_base = OTHER; note = 2'-O-methyluridine-3'-phosphate
  modified_base 6: mod_base = OTHER; note = 2'-deoxy-2'-fluorouridine-3'-phosphate
  modified_base 7: mod_base = OTHER; note = 2'-O-methylcytidine-3'-phosphate
  modified_base 8: mod_base = OTHER; note = 2'-O-methyluridine-3'-phosphate
  modified_base 9: mod_base = OTHER; note = 2'-O-methylcytidine-3'-phosphate
  modified_base 10: mod_base = OTHER; note = 2'-O-methyluridine-3'-phosphate
  modified_base 11: mod_base = OTHER; note = 2'-O-methylguanosine-3'-phosphate
  modified_base 12: mod_base = OTHER; note = 2'-O-methylcytidine-3'-phosphate
  modified_base 13: mod_base = OTHER; note = 2'-O-methyluridine-3'-phosphate
  modified_base 14: mod_base = OTHER; note = 2'-deoxy-2'-fluoroguanosine-3'-phosphate
  modified_base 15: mod_base = OTHER; note = 2'-O-methyluridine-3'-phosphate
  modified_base 16: mod_base = OTHER; note = 2'-deoxy-2'-fluoroadenosine-3'-phosphate
  modified_base 17: mod_base = OTHER; note = 2'-O-methyladenosine-3'-phosphate
  modified_base 18: mod_base = OTHER; note = 2'-O-methylguanosine-3'-phosphate
  modified_base 19: mod_base = OTHER; note = 2'-O-methyladenosine-3'-phosphate
  modified_base 20: mod_base = OTHER; note = 2'-O-methyluridine-3'-phosphate
  modified_base 21: mod_base = OTHER; note = 2'-O-methylguanosine-3'-phosphate
  modified_base 22: mod_base = OTHER; note = 2'-O-methyladenosine-3'-phosphate
  modified_base 23: mod_base = OTHER; note = 2'-O-methylcytidine
tcatttctctgctgtaagatgac

SEQ ID NO: 5603 - RNA, 23 nt, synthetic construct
  source 1..23: mol_type = other RNA
  modified_base 1: mod_base = OTHER; note = 2'-O-methyluridine-3'-phosphate 5'phosphate
  modified_base 2: mod_base = OTHER; note = 2'-deoxy-2'-fluoroguanosine-3'-phosphate
  modified_base 3: mod_base = OTHER; note = 2'-O-methylcytidine-3'-phosphate
  modified_base 4: mod_base = OTHER; note = 2'-O-methyladenosine-3'-phosphate
  modified_base 5: mod_base = OTHER; note = 2'-O-methyluridine-3'-phosphate
  modified_base 6: mod_base = OTHER; note = 2'-deoxy-2'-fluorouridine-3'-phosphate
  modified_base 7: mod_base = OTHER; note = 2'-O-methyluridine-3'-phosphate
  modified_base 8: mod_base = OTHER; note = 2'-O-methylcytidine-3'-phosphate
  modified_base 9: mod_base = OTHER; note = 2'-O-methyluridine-3'-phosphate
  modified_base 10: mod_base = OTHER; note = 2'-O-methylcytidine-3'-phosphate
  modified_base 11: mod_base = OTHER; note = 2'-O-methyluridine-3'-phosphate
  modified_base 12: mod_base = OTHER; note = 2'-O-methylguanosine-3'-phosphate
  modified_base 13: mod_base = OTHER; note = 2'-O-methylcytidine-3'-phosphate
  modified_base 14: mod_base = OTHER; note = 2'-deoxy-2'-fluorouridine-3'-phosphate
  modified_base 15: mod_base = OTHER; note = 2'-O-methylguanosine-3'-phosphate
  modified_base 16: mod_base = OTHER; note = 2'-deoxy-2'-fluorouridine-3'-phosphate
  modified_base 17: mod_base = OTHER; note = 2'-O-methyladenosine-3'-phosphate
  modified_base 18: mod_base = OTHER; note = 2'-O-methyladenosine-3'-phosphate
  modified_base 19: mod_base = OTHER; note = 2'-O-methylguanosine-3'-phosphate
  modified_base 20: mod_base = OTHER; note = 2'-O-methyladenosine-3'-phosphate
  modified_base 21: mod_base = OTHER; note = 2'-O-methyluridine-3'-phosphate
  modified_base 22: mod_base = OTHER; note = 2'-O-methylguanosine-3'-phosphate
  modified_base 23: mod_base = OTHER; note = 2'-O-methyladenosine
tgcatttctctgctgtaagatga

SEQ ID NO: 5604 - RNA, 23 nt, synthetic construct
  source 1..23: mol_type = other RNA
  modified_base 1: mod_base = OTHER; note = 2'-O-methyluridine-3'-phosphate 5'phosphate
  modified_base 2: mod_base = OTHER; note = 2'-deoxy-2'-fluorouridine-3'-phosphate
  modified_base 3: mod_base = OTHER; note = 2'-O-methylguanosine-3'-phosphate
  modified_base 4: mod_base = OTHER; note = 2'-O-methylcytidine-3'-phosphate
  modified_base 5: mod_base = OTHER; note = 2'-O-methyladenosine-3'-phosphate
  modified_base 6: mod_base = OTHER; note = 2'-deoxy-2'-fluorouridine-3'-phosphate
  modified_base 7: mod_base = OTHER; note = 2'-O-methyluridine-3'-phosphate
  modified_base 8: mod_base = OTHER; note = 2'-O-methyluridine-3'-phosphate
  modified_base 9: mod_base = OTHER; note = 2'-O-methylcytidine-3'-phosphate
  modified_base 10: mod_base = OTHER; note = 2'-O-methyluridine-3'-phosphate
  modified_base 11: mod_base = OTHER; note = 2'-O-methylcytidine-3'-phosphate
  modified_base 12: mod_base = OTHER; note = 2'-O-methyluridine-3'-phosphate
  modified_base 13: mod_base = OTHER; note = 2'-O-methylguanosine-3'-phosphate
  modified_base 14: mod_base = OTHER; note = 2'-deoxy-2'-fluorocytidine-3'-phosphate
  modified_base 15: mod_base = OTHER; note = 2'-O-methyluridine-3'-phosphate
  modified_base 16: mod_base = OTHER; note = 2'-deoxy-2'-fluoroguanosine-3'-phosphate
  modified_base 17: mod_base = OTHER; note = 2'-O-methyluridine-3'-phosphate
  modified_base 18: mod_base = OTHER; note = 2'-O-methyladenosine-3'-phosphate
  modified_base 19: mod_base = OTHER; note = 2'-O-methyladenosine-3'-phosphate
  modified_base 20: mod_base = OTHER; note = 2'-O-methylguanosine-3'-phosphate
  modified_base 21: mod_base = OTHER; note = 2'-O-methyladenosine-3'-phosphate
  modified_base 22: mod_base = OTHER; note = 2'-O-methyluridine-3'-phosphate
  modified_base 23: mod_base = OTHER; note = 2'-O-methylguanosine
ttgcatttctctgctgtaagatg

SEQ ID NO: 5605 - RNA, 23 nt, synthetic construct
  source 1..23: mol_type = other RNA
  modified_base 1: mod_base = OTHER; note = 2'-O-methyluridine-3'-phosphate 5'phosphate
  modified_base 2: mod_base = OTHER; note = 2'-deoxy-2'-fluorocytidine-3'-phosphate
  modified_base 3: mod_base = OTHER; note = 2'-O-methyluridine-3'-phosphate
  modified_base 4: mod_base = OTHER; note = 2'-O-methylguanosine-3'-phosphate
  modified_base 5: mod_base = OTHER; note = 2'-O-methylcytidine-3'-phosphate
  modified_base 6: mod_base = OTHER; note = 2'-deoxy-2'-fluoroadenosine-3'-phosphate
  modified_base 7: mod_base = OTHER; note = 2'-O-methyluridine-3'-phosphate
  modified_base 8: mod_base = OTHER; note = 2'-O-methyluridine-3'-phosphate
  modified_base 9: mod_base = OTHER; note = 2'-O-methyluridine-3'-phosphate
  modified_base 10: mod_base = OTHER; note = 2'-O-methylcytidine-3'-phosphate
  modified_base 11: mod_base = OTHER; note = 2'-O-methyluridine-3'-phosphate
  modified_base 12: mod_base = OTHER; note = 2'-O-methylcytidine-3'-phosphate
  modified_base 13: mod_base = OTHER; note = 2'-O-methyluridine-3'-phosphate
  modified_base 14: mod_base = OTHER; note = 2'-deoxy-2'-fluoroguanosine-3'-phosphate
  modified_base 15: mod_base = OTHER; note = 2'-O-methylcytidine-3'-phosphate
  modified_base 16: mod_base = OTHER; note = 2'-deoxy-2'-fluorouridine-3'-phosphate
  modified_base 17: mod_base = OTHER; note = 2'-O-methylguanosine-3'-phosphate
  modified_base 18: mod_base = OTHER; note = 2'-O-methyluridine-3'-phosphate
  modified_base 19: mod_base = OTHER; note = 2'-O-methyladenosine-3'-phosphate
  modified_base 20: mod_base = OTHER; note = 2'-O-methyladenosine-3'-phosphate
  modified_base 21: mod_base = OTHER; note = 2'-O-methylguanosine-3'-phosphate
  modified_base 22: mod_base = OTHER; note = 2'-O-methyladenosine-3'-phosphate
  modified_base 23: mod_base = OTHER; note = 2'-O-methyluridine
tctgcatttctctgctgtaagat

SEQ ID NO: 5606 - RNA, 23 nt, synthetic construct
  source 1..23: mol_type = other RNA
  modified_base 1: mod_base = OTHER; note = 2'-O-methyluridine-3'-phosphate 5'phosphate
  modified_base 2: mod_base = OTHER; note = 2'-deoxy-2'-fluorouridine-3'-phosphate
  modified_base 3: mod_base = OTHER; note = 2'-O-methylcytidine-3'-phosphate
  modified_base 4: mod_base = OTHER; note = 2'-O-methyluridine-3'-phosphate
  modified_base 5: mod_base = OTHER; note = 2'-O-methylguanosine-3'-phosphate
  modified_base 6: mod_base = OTHER; note = 2'-deoxy-2'-fluorocytidine-3'-phosphate
  modified_base 7: mod_base = OTHER; note = 2'-O-methyladenosine-3'-phosphate
  modified_base 8: mod_base = OTHER; note = 2'-O-methyluridine-3'-phosphate
  modified_base 9: mod_base = OTHER; note = 2'-O-methyluridine-3'-phosphate
  modified_base 10: mod_base = OTHER; note = 2'-O-methyluridine-3'-phosphate
  modified_base 11: mod_base = OTHER; note = 2'-O-methylcytidine-3'-phosphate
  modified_base 12: mod_base = OTHER; note = 2'-O-methyluridine-3'-phosphate
  modified_base 13: mod_base = OTHER; note = 2'-O-methylcytidine-3'-phosphate
  modified_base 14: mod_base = OTHER; note = 2'-deoxy-2'-fluorouridine-3'-phosphate
  modified_base 15: mod_base = OTHER; note = 2'-O-methylguanosine-3'-phosphate
  modified_base 16: mod_base = OTHER; note = 2'-deoxy-2'-fluorocytidine-3'-phosphate
  modified_base 17: mod_base = OTHER; note = 2'-O-methyluridine-3'-phosphate
  modified_base 18: mod_base = OTHER; note = 2'-O-methylguanosine-3'-phosphate
  modified_base 19: mod_base = OTHER; note = 2'-O-methyluridine-3'-phosphate
  modified_base 20: mod_base = OTHER; note = 2'-O-methyladenosine-3'-phosphate
  modified_base 21: mod_base = OTHER; note = 2'-O-methyladenosine-3'-phosphate
  modified_base 22: mod_base = OTHER; note = 2'-O-methylguanosine-3'-phosphate
  modified_base 23: mod_base = OTHER; note = 2'-O-methyladenosine
ttctgcatttctctgctgtaaga

SEQ ID NO: 5607 - RNA, 23 nt, synthetic construct
  source 1..23: mol_type = other RNA
  modified_base 1: mod_base = OTHER; note = 2'-O-methyluridine-3'-phosphate 5'phosphate
  modified_base 2: mod_base = OTHER; note = 2'-deoxy-2'-fluorocytidine-3'-phosphate
  modified_base 3: mod_base = OTHER; note = 2'-O-methyluridine-3'-phosphate
  modified_base 4: mod_base = OTHER; note = 2'-O-methylcytidine-3'-phosphate
  modified_base 5: mod_base = OTHER; note = 2'-O-methyluridine-3'-phosphate
  modified_base 6: mod_base = OTHER; note = 2'-deoxy-2'-fluoroguanosine-3'-phosphate
  modified_base 7: mod_base = OTHER; note = 2'-O-methylcytidine-3'-phosphate
  modified_base 8: mod_base = OTHER; note = 2'-O-methyladenosine-3'-phosphate
  modified_base 9: mod_base = OTHER; note = 2'-O-methyluridine-3'-phosphate
  modified_base 10: mod_base = OTHER; note = 2'-O-methyluridine-3'-phosphate
  modified_base 11: mod_base = OTHER; note = 2'-O-methyluridine-3'-phosphate
  modified_base 12: mod_base = OTHER; note = 2'-O-methylcytidine-3'-phosphate
  modified_base 13: mod_base = OTHER; note = 2'-O-methyluridine-3'-phosphate
  modified_base 14: mod_base = OTHER; note = 2'-deoxy-2'-fluorocytidine-3'-phosphate
  modified_base 15: mod_base = OTHER; note = 2'-O-methyluridine-3'-phosphate
  modified_base 16: mod_base = OTHER; note = 2'-deoxy-2'-fluoroguanosine-3'-phosphate
  modified_base 17: mod_base = OTHER; note = 2'-O-methylcytidine-3'-phosphate
  modified_base 18: mod_base = OTHER; note = 2'-O-methyluridine-3'-phosphate
  modified_base 19: mod_base = OTHER; note = 2'-O-methylguanosine-3'-phosphate
  modified_base 20: mod_base = OTHER; note = 2'-O-methyluridine-3'-phosphate
  modified_base 21: mod_base = OTHER; note = 2'-O-methyladenosine-3'-phosphate
  modified_base 22: mod_base = OTHER; note = 2'-O-methyladenosine-3'-phosphate
  modified_base 23: mod_base = OTHER; note = 2'-O-methylguanosine
tctctgcatttctctgctgtaag

SEQ ID NO: 5608 - RNA, 23 nt, synthetic construct
  source 1..23: mol_type = other RNA
  modified_base 1: mod_base = OTHER; note = 2'-O-methyluridine-3'-phosphate 5'phosphate
  modified_base 2: mod_base = OTHER; note = 2'-deoxy-2'-fluorouridine-3'-phosphate
  modified_base 3: mod_base = OTHER; note = 2'-O-methylcytidine-3'-phosphate
  modified_base 4: mod_base = OTHER; note = 2'-O-methyluridine-3'-phosphate
  modified_base 5: mod_base = OTHER; note = 2'-O-methylcytidine-3'-phosphate
  modified_base 6: mod_base = OTHER; note = 2'-deoxy-2'-fluorouridine-3'-phosphate
  modified_base 7: mod_base = OTHER; note = 2'-O-methylguanosine-3'-phosphate
  modified_base 8: mod_base = OTHER; note = 2'-O-methylcytidine-3'-phosphate
  modified_base 9: mod_base = OTHER; note = 2'-O-methyladenosine-3'-phosphate
  modified_base 10: mod_base = OTHER; note = 2'-O-methyluridine-3'-phosphate
  modified_base 11: mod_base = OTHER; note = 2'-O-methyluridine-3'-phosphate
  modified_base 12: mod_base = OTHER; note = 2'-O-methyluridine-3'-phosphate
  modified_base 13: mod_base = OTHER; note = 2'-O-methylcytidine-3'-phosphate
  modified_base 14: mod_base = OTHER; note = 2'-deoxy-2'-fluorouridine-3'-phosphate
  modified_base 15: mod_base = OTHER; note = 2'-O-methylcytidine-3'-phosphate
  modified_base 16: mod_base = OTHER; note = 2'-deoxy-2'-fluorouridine-3'-phosphate
  modified_base 17: mod_base = OTHER; note = 2'-O-methylguanosine-3'-phosphate
  modified_base 18: mod_base = OTHER; note = 2'-O-methylcytidine-3'-phosphate
  modified_base 19: mod_base = OTHER; note = 2'-O-methyluridine-3'-phosphate
  modified_base 20: mod_base = OTHER; note = 2'-O-methylguanosine-3'-phosphate
  modified_base 21: mod_base = OTHER; note = 2'-O-methyluridine-3'-phosphate
  modified_base 22: mod_base = OTHER; note = 2'-O-methyladenosine-3'-phosphate
  modified_base 23: mod_base = OTHER; note = 2'-O-methyladenosine
ttctctgcatttctctgctgtaa

SEQ ID NO: 5609 - RNA, 23 nt, synthetic construct
  source 1..23: mol_type = other RNA
  modified_base 1: mod_base = OTHER; note = 2'-O-methyluridine-3'-phosphate 5'phosphate
  modified_base 2: mod_base = OTHER; note = 2'-deoxy-2'-fluorouridine-3'-phosphate
  modified_base 3: mod_base = OTHER; note = 2'-O-methyluridine-3'-phosphate
  modified_base 4: mod_base = OTHER; note = 2'-O-methylcytidine-3'-phosphate
  modified_base 5: mod_base = OTHER; note = 2'-O-methyluridine-3'-phosphate
  modified_base 6: mod_base = OTHER; note = 2'-deoxy-2'-fluorocytidine-3'-phosphate
  modified_base 7: mod_base = OTHER; note = 2'-O-methyluridine-3'-phosphate
  modified_base 8: mod_base = OTHER; note = 2'-O-methylguanosine-3'-phosphate
  modified_base 9: mod_base = OTHER; note = 2'-O-methylcytidine-3'-phosphate
  modified_base 10: mod_base = OTHER; note = 2'-O-methyladenosine-3'-phosphate
  modified_base 11: mod_base = OTHER; note = 2'-O-methyluridine-3'-phosphate
  modified_base 12: mod_base = OTHER; note = 2'-O-methyluridine-3'-phosphate
  modified_base 13: mod_base = OTHER; note = 2'-O-methyluridine-3'-phosphate
  modified_base 14: mod_base = OTHER; note = 2'-deoxy-2'-fluorocytidine-3'-phosphate
  modified_base 15: mod_base = OTHER; note = 2'-O-methyluridine-3'-phosphate
  modified_base 16: mod_base = OTHER; note = 2'-deoxy-2'-fluorocytidine-3'-phosphate
  modified_base 17: mod_base = OTHER; note = 2'-O-methyluridine-3'-phosphate
  modified_base 18: mod_base = OTHER; note = 2'-O-methylguanosine-3'-phosphate
  modified_base 19: mod_base = OTHER; note = 2'-O-methylcytidine-3'-phosphate
  modified_base 20: mod_base = OTHER; note = 2'-O-methyluridine-3'-phosphate
  modified_base 21: mod_base = OTHER; note = 2'-O-methylguanosine-3'-phosphate
  modified_base 22: mod_base = OTHER; note = 2'-O-methyluridine-3'-phosphate
  modified_base 23: mod_base = OTHER; note = 2'-O-methyladenosine
tttctctgcatttctctgctgta

SEQ ID NO: 5610 - RNA, 23 nt, synthetic construct
  source 1..23: mol_type = other RNA
  modified_base 1: mod_base = OTHER; note = 2'-O-methyluridine-3'-phosphate 5'phosphate
  modified_base 2: mod_base = OTHER; note = 2'-deoxy-2'-fluorouridine-3'-phosphate
  modified_base 3: mod_base = OTHER; note = 2'-O-methyluridine-3'-phosphate
  modified_base 4: mod_base = OTHER; note = 2'-O-methyluridine-3'-phosphate
  modified_base 5: mod_base = OTHER; note = 2'-O-methylcytidine-3'-phosphate
  modified_base 6: mod_base = OTHER; note = 2'-deoxy-2'-fluorouridine-3'-phosphate
  modified_base 7: mod_base = OTHER; note = 2'-O-methylcytidine-3'-phosphate
  modified_base 8: mod_base = OTHER; note = 2'-O-methyluridine-3'-phosphate
  modified_base 9: mod_base = OTHER; note = 2'-O-methylguanosine-3'-phosphate
  modified_base 10: mod_base = OTHER; note = 2'-O-methylcytidine-3'-phosphate
  modified_base 11: mod_base = OTHER; note = 2'-O-methyladenosine-3'-phosphate
  modified_base 12: mod_base = OTHER; note = 2'-O-methyluridine-3'-phosphate
  modified_base 13: mod_base = OTHER; note = 2'-O-methyluridine-3'-phosphate
  modified_base 14: mod_base = OTHER; note = 2'-deoxy-2'-fluorouridine-3'-phosphate
  modified_base 15: mod_base = OTHER; note = 2'-O-methylcytidine-3'-phosphate
  modified_base 16: mod_base = OTHER; note = 2'-deoxy-2'-fluorouridine-3'-phosphate
  modified_base 17: mod_base = OTHER; note = 2'-O-methylcytidine-3'-phosphate
  modified_base 18: mod_base = OTHER; note = 2'-O-methyluridine-3'-phosphate
  modified_base 19: mod_base = OTHER; note = 2'-O-methylguanosine-3'-phosphate
  modified_base 20: mod_base = OTHER; note = 2'-O-methylcytidine-3'-phosphate
  modified_base 21: mod_base = OTHER; note = 2'-O-methyluridine-3'-phosphate
  modified_base 22: mod_base = OTHER; note = 2'-O-methylguanosine-3'-phosphate
  modified_base 23: mod_base = OTHER; note = 2'-O-methyluridine
ttttctctgcatttctctgctgt

SEQ ID NO: 5611 - RNA, 23 nt, synthetic construct
  source 1..23: mol_type = other RNA
  modified_base 1: mod_base = OTHER; note = 2'-O-methyluridine-3'-phosphate 5'phosphate
  modified_base 2: mod_base = OTHER; note = 2'-deoxy-2'-fluorouridine-3'-phosphate
  modified_base 3: mod_base = OTHER; note = 2'-O-methyluridine-3'-phosphate
  modified_base 4: mod_base = OTHER; note = 2'-O-methyluridine-3'-phosphate
  modified_base 5: mod_base = OTHER; note = 2'-O-methyluridine-3'-phosphate
  modified_base 6: mod_base = OTHER; note = 2'-deoxy-2'-fluorocytidine-3'-phosphate
  modified_base 7: mod_base = OTHER; note = 2'-O-methyluridine-3'-phosphate
  modified_base 8: mod_base = OTHER; note = 2'-O-methylcytidine-3'-phosphate
  modified_base 9: mod_base = OTHER; note = 2'-O-methyluridine-3'-phosphate
  modified_base 10: mod_base = OTHER; note = 2'-O-methylguanosine-3'-phosphate
  modified_base 11: mod_base = OTHER; note = 2'-O-methylcytidine-3'-phosphate
  modified_base 12: mod_base = OTHER; note = 2'-O-methyladenosine-3'-phosphate
  modified_base 13: mod_base = OTHER; note = 2'-O-methyluridine-3'-phosphate
  modified_base 14: mod_base = OTHER; note = 2'-deoxy-2'-fluorouridine-3'-phosphate
  modified_base 15: mod_base = OTHER; note = 2'-O-methyluridine-3'-phosphate
  modified_base 16: mod_base = OTHER; note = 2'-deoxy-2'-fluorocytidine-3'-phosphate
  modified_base 17: mod_base = OTHER; note = 2'-O-methyluridine-3'-phosphate
  modified_base 18: mod_base = OTHER; note = 2'-O-methylcytidine-3'-phosphate
  modified_base 19: mod_base = OTHER; note = 2'-O-methyluridine-3'-phosphate
  modified_base 20: mod_base = OTHER; note = 2'-O-methylguanosine-3'-phosphate
  modified_base 21: mod_base = OTHER; note = 2'-O-methylcytidine-3'-phosphate
  modified_base 22: mod_base = OTHER; note = 2'-O-methyluridine-3'-phosphate
  modified_base 23: mod_base = OTHER; note = 2'-O-methylguanosine
tttttctctgcatttctctgctg

SEQ ID NO: 5612 - RNA, 23 nt, synthetic construct
  source 1..23: mol_type = other RNA
  modified_base 1: mod_base = OTHER; note = 2'-O-methyluridine-3'-phosphate 5'phosphate
  modified_base 2: mod_base = OTHER; note = 2'-deoxy-2'-fluorocytidine-3'-phosphate
  modified_base 3: mod_base = OTHER; note = 2'-O-methyluridine-3'-phosphate
  modified_base 4: mod_base = OTHER; note = 2'-O-methyluridine-3'-phosphate
  modified_base 5: mod_base = OTHER; note = 2'-O-methyluridine-3'-phosphate
  modified_base 6: mod_base = OTHER; note = 2'-deoxy-2'-fluorouridine-3'-phosphate
  modified_base 7: mod_base = OTHER; note = 2'-O-methylcytidine-3'-phosphate
  modified_base 8: mod_base = OTHER; note = 2'-O-methyluridine-3'-phosphate
  modified_base 9: mod_base = OTHER; note = 2'-O-methylcytidine-3'-phosphate
  modified_base 10: mod_base = OTHER; note = 2'-O-methyluridine-3'-phosphate
  modified_base 11: mod_base = OTHER; note = 2'-O-methylguanosine-3'-phosphate
  modified_base 12: mod_base = OTHER; note = 2'-O-methylcytidine-3'-phosphate
  modified_base 13: mod_base = OTHER; note = 2'-O-methyladenosine-3'-phosphate
  modified_base 14: mod_base = OTHER; note = 2'-deoxy-2'-fluorouridine-3'-phosphate
  modified_base 15: mod_base = OTHER; note = 2'-O-methyluridine-3'-phosphate
  modified_base 16: mod_base = OTHER; note = 2'-deoxy-2'-fluorouridine-3'-phosphate
  modified_base 17: mod_base = OTHER; note = 2'-O-methylcytidine-3'-phosphate
  modified_base 18: mod_base = OTHER; note = 2'-O-methyluridine-3'-phosphate
  modified_base 19: mod_base = OTHER; note = 2'-O-methylcytidine-3'-phosphate
  modified_base 20: mod_base = OTHER; note = 2'-O-methyluridine-3'-phosphate
  modified_base 21: mod_base = OTHER; note = 2'-O-methylguanosine-3'-phosphate
  modified_base 22: mod_base = OTHER; note = 2'-O-methylcytidine-3'-phosphate
  modified_base 23: mod_base = OTHER; note = 2'-O-methyluridine
tcttttctctgcatttctctgct

SEQ ID NO: 5613 - RNA, 23 nt, synthetic construct
  source 1..23: mol_type = other RNA
  modified_base 1: mod_base = OTHER; note = 2'-O-methyluridine-3'-phosphate 5'phosphate
  modified_base 2: mod_base = OTHER; note = 2'-deoxy-2'-fluoroguanosine-3'-phosphate
  modified_base 3: mod_base = OTHER; note = 2'-O-methylcytidine-3'-phosphate
  modified_base 4: mod_base = OTHER; note = 2'-O-methyluridine-3'-phosphate
  modified_base 5: mod_base = OTHER; note = 2'-O-methyluridine-3'-phosphate
  modified_base 6: mod_base = OTHER; note = 2'-deoxy-2'-fluorouridine-3'-phosphate
  modified_base 7: mod_base = OTHER; note = 2'-O-methyluridine-3'-phosphate
  modified_base 8: mod_base = OTHER; note = 2'-O-methylcytidine-3'-phosphate
  modified_base 9: mod_base = OTHER; note = 2'-O-methyluridine-3'-phosphate
  modified_base 10: mod_base = OTHER; note = 2'-O-methylcytidine-3'-phosphate
  modified_base 11: mod_base = OTHER; note = 2'-O-methyluridine-3'-phosphate
  modified_base 12: mod_base = OTHER; note = 2'-O-methylguanosine-3'-phosphate
  modified_base 13: mod_base = OTHER; note = 2'-O-methylcytidine-3'-phosphate
  modified_base 14: mod_base = OTHER; note = 2'-deoxy-2'-fluoroadenosine-3'-phosphate
  modified_base 15: mod_base = OTHER; note = 2'-O-methyluridine-3'-phosphate
  modified_base 16: mod_base = OTHER; note = 2'-deoxy-2'-fluorouridine-3'-phosphate
  modified_base 17: mod_base = OTHER; note = 2'-O-methyluridine-3'-phosphate
  modified_base 18: mod_base = OTHER; note = 2'-O-methylcytidine-3'-phosphate
  modified_base 19: mod_base = OTHER; note = 2'-O-methyluridine-3'-phosphate
  modified_base 20: mod_base = OTHER; note = 2'-O-methylcytidine-3'-phosphate
  modified_base 21: mod_base = OTHER; note = 2'-O-methyluridine-3'-phosphate
  modified_base 22: mod_base = OTHER; note = 2'-O-methylguanosine-3'-phosphate
  modified_base 23: mod_base = OTHER; note = 2'-O-methylcytidine
tgcttttctctgcatttctctgc

SEQ ID NO: 5614 - RNA, 23 nt, synthetic construct
  source 1..23: mol_type = other RNA
  modified_base 1: mod_base = OTHER; note = 2'-O-methyluridine-3'-phosphate 5'phosphate
  modified_base 2: mod_base = OTHER; note = 2'-deoxy-2'-fluorouridine-3'-phosphate
  modified_base 3: mod_base = OTHER; note = 2'-O-methylguanosine-3'-phosphate
  modified_base 4: mod_base = OTHER; note = 2'-O-methylcytidine-3'-phosphate
  modified_base 5: mod_base = OTHER; note = 2'-O-methyluridine-3'-phosphate
  modified_base 6: mod_base = OTHER; note = 2'-deoxy-2'-fluorouridine-3'-phosphate
  modified_base 7: mod_base = OTHER; note = 2'-O-methyluridine-3'-phosphate
  modified_base 8: mod_base = OTHER; note = 2'-O-methyluridine-3'-phosphate
  modified_base 9: mod_base = OTHER; note = 2'-O-methylcytidine-3'-phosphate
  modified_base 10: mod_base = OTHER; note = 2'-O-methyluridine-3'-phosphate
  modified_base 11: mod_base = OTHER; note = 2'-O-methylcytidine-3'-phosphate
  modified_base 12: mod_base = OTHER; note = 2'-O-methyluridine-3'-phosphate
  modified_base 13: mod_base = OTHER; note = 2'-O-methylguanosine-3'-phosphate
  modified_base 14: mod_base = OTHER; note = 2'-deoxy-2'-fluorocytidine-3'-phosphate
  modified_base 15: mod_base = OTHER; note = 2'-O-methyladenosine-3'-phosphate
  modified_base 16: mod_base = OTHER; note = 2'-deoxy-2'-fluorouridine-3'-phosphate
  modified_base 17: mod_base = OTHER; note = 2'-O-methyluridine-3'-phosphate
  modified_base 18: mod_base = OTHER; note = 2'-O-methyluridine-3'-phosphate
  modified_base 19: mod_base = OTHER; note = 2'-O-methylcytidine-3'-phosphate
  modified_base 20: mod_base = OTHER; note = 2'-O-methyluridine-3'-phosphate
  modified_base 21: mod_base = OTHER; note = 2'-O-methylcytidine-3'-phosphate
  modified_base 22: mod_base = OTHER; note = 2'-O-methyluridine-3'-phosphate
  modified_base 23: mod_base = OTHER; note = 2'-O-methylguanosine
ttgcttttctctgcatttctctg

SEQ ID NO: 5615 - RNA, 23 nt, synthetic construct
  source 1..23: mol_type = other RNA
  modified_base 1: mod_base = OTHER; note = 2'-O-methyluridine-3'-phosphate 5'phosphate
  modified_base 2: mod_base = OTHER; note = 2'-deoxy-2'-fluorouridine-3'-phosphate
  modified_base 3: mod_base = OTHER; note = 2'-O-methyluridine-3'-phosphate
  modified_base 4: mod_base = OTHER; note = 2'-O-methylguanosine-3'-phosphate
  modified_base 5: mod_base = OTHER; note = 2'-O-methylcytidine-3'-phosphate
  modified_base 6: mod_base = OTHER; note = 2'-deoxy-2'-fluorouridine-3'-phosphate
  modified_base 7: mod_base = OTHER; note = 2'-O-methyluridine-3'-phosphate
  modified_base 8: mod_base = OTHER; note = 2'-O-methyluridine-3'-phosphate
  modified_base 9: mod_base = OTHER; note = 2'-O-methyluridine-3'-phosphate
  modified_base 10: mod_base = OTHER; note = 2'-O-methylcytidine-3'-phosphate
  modified_base 11: mod_base = OTHER; note = 2'-O-methyluridine-3'-phosphate
  modified_base 12: mod_base = OTHER; note = 2'-O-methylcytidine-3'-phosphate
  modified_base 13: mod_base = OTHER; note = 2'-O-methyluridine-3'-phosphate
  modified_base 14: mod_base = OTHER; note = 2'-deoxy-2'-fluoroguanosine-3'-phosphate
  modified_base 15: mod_base = OTHER; note = 2'-O-methylcytidine-3'-phosphate
  modified_base 16: mod_base = OTHER; note = 2'-deoxy-2'-fluoroadenosine-3'-phosphate
  modified_base 17: mod_base = OTHER; note = 2'-O-methyluridine-3'-phosphate
  modified_base 18: mod_base = OTHER; note = 2'-O-methyluridine-3'-phosphate
  modified_base 19: mod_base = OTHER; note = 2'-O-methyluridine-3'-phosphate
  modified_base 20: mod_base = OTHER; note = 2'-O-methylcytidine-3'-phosphate
  modified_base 21: mod_base = OTHER; note = 2'-O-methyluridine-3'-phosphate
  modified_base 22: mod_base = OTHER; note = 2'-O-methylcytidine-3'-phosphate
  modified_base 23: mod_base = OTHER; note = 2'-O-methyluridine
tttgcttttctctgcatttctct

SEQ ID NO: 5616 - RNA, 23 nt, synthetic construct
  source 1..23: mol_type = other RNA
  modified_base 1: mod_base = OTHER; note = 2'-O-methyluridine-3'-phosphate 5'phosphate
  modified_base 2: mod_base = OTHER; note = 2'-deoxy-2'-fluorouridine-3'-phosphate
  modified_base 3: mod_base = OTHER; note = 2'-O-methyluridine-3'-phosphate
  modified_base 4: mod_base = OTHER; note = 2'-O-methyluridine-3'-phosphate
  modified_base 5: mod_base = OTHER; note = 2'-O-methylguanosine-3'-phosphate
  modified_base 6: mod_base = OTHER; note = 2'-deoxy-2'-fluorocytidine-3'-phosphate
  modified_base 7: mod_base = OTHER; note = 2'-O-methyluridine-3'-phosphate
  modified_base 8: mod_base = OTHER; note = 2'-O-methyluridine-3'-phosphate
  modified_base 9: mod_base = OTHER; note = 2'-O-methyluridine-3'-phosphate
  modified_base 10: mod_base = OTHER; note = 2'-O-methyluridine-3'-phosphate
  modified_base 11: mod_base = OTHER; note = 2'-O-methylcytidine-3'-phosphate
  modified_base 12: mod_base = OTHER; note = 2'-O-methyluridine-3'-phosphate
  modified_base 13: mod_base = OTHER; note = 2'-O-methylcytidine-3'-phosphate
  modified_base 14: mod_base = OTHER; note = 2'-deoxy-2'-fluorouridine-3'-phosphate
  modified_base 15: mod_base = OTHER; note = 2'-O-methylguanosine-3'-phosphate
  modified_base 16: mod_base = OTHER; note = 2'-deoxy-2'-fluorocytidine-3'-phosphate
  modified_base 17: mod_base = OTHER; note = 2'-O-methyladenosine-3'-phosphate
  modified_base 18: mod_base = OTHER; note = 2'-O-methyluridine-3'-phosphate
  modified_base 19: mod_base = OTHER; note = 2'-O-methyluridine-3'-phosphate
  modified_base 20: mod_base = OTHER; note = 2'-O-methyluridine-3'-phosphate
  modified_base 21: mod_base = OTHER; note = 2'-O-methylcytidine-3'-phosphate
  modified_base 22: mod_base = OTHER; note = 2'-O-methyluridine-3'-phosphate
  modified_base 23: mod_base = OTHER; note = 2'-O-methylcytidine
ttttgcttttctctgcatttctc

SEQ ID NO: 5617 - RNA, 23 nt, synthetic construct
  source 1..23: mol_type = other RNA
  modified_base 1: mod_base = OTHER; note = 2'-O-methyluridine-3'-phosphate 5'phosphate
  modified_base 2: mod_base = OTHER; note = 2'-deoxy-2'-fluorouridine-3'-phosphate
  modified_base 3: mod_base = OTHER; note = 2'-O-methyluridine-3'-phosphate
  modified_base 4: mod_base = OTHER; note = 2'-O-methyluridine-3'-phosphate
  modified_base 5: mod_base = OTHER; note = 2'-O-methyluridine-3'-phosphate
  modified_base 6: mod_base = OTHER; note = 2'-deoxy-2'-fluoroguanosine-3'-phosphate
  modified_base 7: mod_base = OTHER; note = 2'-O-methylcytidine-3'-phosphate
  modified_base 8: mod_base = OTHER; note = 2'-O-methyluridine-3'-phosphate
  modified_base 9: mod_base = OTHER; note = 2'-O-methyluridine-3'-phosphate
  modified_base 10: mod_base = OTHER; note = 2'-O-methyluridine-3'-phosphate
  modified_base 11: mod_base = OTHER; note = 2'-O-methyluridine-3'-phosphate
  modified_base 12: mod_base = OTHER; note = 2'-O-methylcytidine-3'-phosphate
  modified_base 13: mod_base = OTHER; note = 2'-O-methyluridine-3'-phosphate
  modified_base 14: mod_base = OTHER; note = 2'-deoxy-2'-fluorocytidine-3'-phosphate
  modified_base 15: mod_base = OTHER; note = 2'-O-methyluridine-3'-phosphate
  modified_base 16: mod_base = OTHER; note = 2'-deoxy-2'-fluoroguanosine-3'-phosphate
  modified_base 17: mod_base = OTHER; note = 2'-O-methylcytidine-3'-phosphate
  modified_base 18: mod_base = OTHER; note = 2'-O-methyladenosine-3'-phosphate
  modified_base 19: mod_base = OTHER; note = 2'-O-methyluridine-3'-phosphate
  modified_base 20: mod_base = OTHER; note = 2'-O-methyluridine-3'-phosphate
  modified_base 21: mod_base = OTHER; note = 2'-O-methyluridine-3'-phosphate
  modified_base 22: mod_base = OTHER; note = 2'-O-methylcytidine-3'-phosphate
  modified_base 23: mod_base = OTHER; note = 2'-O-methyluridine
tttttgcttttctctgcatttct

SEQ ID NO: 5618 - RNA, 23 nt, synthetic construct
  source 1..23: mol_type = other RNA
  modified_base 1: mod_base = OTHER; note = 2'-O-methyluridine-3'-phosphate 5'phosphate
  modified_base 2: mod_base = OTHER; note = 2'-deoxy-2'-fluoroguanosine-3'-phosphate
  modified_base 3: mod_base = OTHER; note = 2'-O-methyluridine-3'-phosphate
  modified_base 4: mod_base = OTHER; note = 2'-O-methyluridine-3'-phosphate
  modified_base 5: mod_base = OTHER; note = 2'-O-methyluridine-3'-phosphate
  modified_base 6: mod_base = OTHER; note = 2'-deoxy-2'-fluorouridine-3'-phosphate
  modified_base 7: mod_base = OTHER; note = 2'-O-methylguanosine-3'-phosphate
  modified_base 8: mod_base = OTHER; note = 2'-O-methylcytidine-3'-phosphate
  modified_base 9: mod_base = OTHER; note = 2'-O-methyluridine-3'-phosphate
  modified_base 10: mod_base = OTHER; note = 2'-O-methyluridine-3'-phosphate
  modified_base 11: mod_base = OTHER; note = 2'-O-methyluridine-3'-phosphate
  modified_base 12: mod_base = OTHER; note = 2'-O-methyluridine-3'-phosphate
  modified_base 13: mod_base = OTHER; note = 2'-O-methylcytidine-3'-phosphate
  modified_base 14: mod_base = OTHER; note = 2'-deoxy-2'-fluorouridine-3'-phosphate
  modified_base 15: mod_base = OTHER; note = 2'-O-methylcytidine-3'-phosphate
  modified_base 16: mod_base = OTHER; note = 2'-deoxy-2'-fluorouridine-3'-phosphate
  modified_base 17: mod_base = OTHER; note = 2'-O-methylguanosine-3'-phosphate
  modified_base 18: mod_base = OTHER; note = 2'-O-methylcytidine-3'-phosphate
  modified_base 19: mod_base = OTHER; note = 2'-O-methyladenosine-3'-phosphate
  modified_base 20: mod_base = OTHER; note = 2'-O-methyluridine-3'-phosphate
  modified_base 21: mod_base = OTHER; note = 2'-O-methyluridine-3'-phosphate
  modified_base 22: mod_base = OTHER; note = 2'-O-methyluridine-3'-phosphate
  modified_base 23: mod_base = OTHER; note = 2'-O-methylcytidine
tgttttgcttttctctgcatttc

SEQ ID NO: 5619 - RNA, 23 nt, synthetic construct
  source 1..23: mol_type = other RNA
  modified_base 1: mod_base = OTHER; note = 2'-O-methyluridine-3'-phosphate 5'phosphate
  modified_base 2: mod_base = OTHER; note = 2'-deoxy-2'-fluoroadenosine-3'-phosphate
  modified_base 3: mod_base = OTHER; note = 2'-O-methylguanosine-3'-phosphate
  modified_base 4: mod_base = OTHER; note = 2'-O-methyluridine-3'-phosphate
  modified_base 5: mod_base = OTHER; note = 2'-O-methyluridine-3'-phosphate
  modified_base 6: mod_base = OTHER; note = 2'-deoxy-2'-fluorouridine-3'-phosphate
  modified_base 7: mod_base = OTHER; note = 2'-O-methyluridine-3'-phosphate
  modified_base 8: mod_base = OTHER; note = 2'-O-methylguanosine-3'-phosphate
  modified_base 9: mod_base = OTHER; note = 2'-O-methylcytidine-3'-phosphate
  modified_base 10: mod_base = OTHER; note = 2'-O-methyluridine-3'-phosphate
  modified_base 11: mod_base = OTHER; note = 2'-O-methyluridine-3'-phosphate
  modified_base 12: mod_base = OTHER; note = 2'-O-methyluridine-3'-phosphate
  modified_base 13: mod_base = OTHER; note = 2'-O-methyluridine-3'-phosphate
  modified_base 14: mod_base = OTHER; note = 2'-deoxy-2'-fluorocytidine-3'-phosphate
  modified_base 15: mod_base = OTHER; note = 2'-O-methyluridine-3'-phosphate
  modified_base 16: mod_base = OTHER; note = 2'-deoxy-2'-fluorocytidine-3'-phosphate
  modified_base 17: mod_base = OTHER; note = 2'-O-methyluridine-3'-phosphate
  modified_base 18: mod_base = OTHER; note = 2'-O-methylguanosine-3'-phosphate
  modified_base 19: mod_base = OTHER; note = 2'-O-methylcytidine-3'-phosphate
  modified_base 20: mod_base = OTHER; note = 2'-O-methyladenosine-3'-phosphate
  modified_base 21: mod_base = OTHER; note = 2'-O-methyluridine-3'-phosphate
  modified_base 22: mod_base = OTHER; note = 2'-O-methyluridine-3'-phosphate
  modified_base 23: mod_base = OTHER; note = 2'-O-methyluridine
tagttttgcttttctctgcattt

SEQ ID NO: 5620 - RNA, 23 nt, synthetic construct
  source 1..23: mol_type = other RNA
  modified_base 1: mod_base = OTHER; note = 2'-O-methyluridine-3'-phosphate 5'phosphate
  modified_base 2: mod_base = OTHER; note = 2'-deoxy-2'-fluorocytidine-3'-phosphate
  modified_base 3: mod_base = OTHER; note = 2'-O-methyladenosine-3'-phosphate
  modified_base 4: mod_base = OTHER; note = 2'-O-methylguanosine-3'-phosphate
  modified_base 5: mod_base = OTHER; note = 2'-O-methyluridine-3'-phosphate
  modified_base 6: mod_base = OTHER; note = 2'-deoxy-2'-fluorouridine-3'-phosphate
  modified_base 7: mod_base = OTHER; note = 2'-O-methyluridine-3'-phosphate
  modified_base 8: mod_base = OTHER; note = 2'-O-methyluridine-3'-phosphate
  modified_base 9: mod_base = OTHER; note = 2'-O-methylguanosine-3'-phosphate
  modified_base 10: mod_base = OTHER; note = 2'-O-methylcytidine-3'-phosphate
  modified_base 11: mod_base = OTHER; note = 2'-O-methyluridine-3'-phosphate
  modified_base 12: mod_base = OTHER; note = 2'-O-methyluridine-3'-phosphate
  modified_base 13: mod_base = OTHER; note = 2'-O-methyluridine-3'-phosphate
  modified_base 14: mod_base = OTHER; note = 2'-deoxy-2'-fluorouridine-3'-phosphate
  modified_base 15: mod_base = OTHER; note = 2'-O-methylcytidine-3'-phosphate
  modified_base 16: mod_base = OTHER; note = 2'-deoxy-2'-fluorouridine-3'-phosphate
  modified_base 17: mod_base = OTHER; note = 2'-O-methylcytidine-3'-phosphate
  modified_base 18: mod_base = OTHER; note = 2'-O-methyluridine-3'-phosphate
  modified_base 19: mod_base = OTHER; note = 2'-O-methylguanosine-3'-phosphate
  modified_base 20: mod_base = OTHER; note = 2'-O-methylcytidine-3'-phosphate
  modified_base 21: mod_base = OTHER; note = 2'-O-methyladenosine-3'-phosphate
  modified_base 22: mod_base = OTHER; note = 2'-O-methyluridine-3'-phosphate
  modified_base 23: mod_base = OTHER; note = 2'-O-methyluridine
tcagttttgcttttctctgcatt

SEQ ID NO: 5621 - RNA, 23 nt, synthetic construct
  source 1..23: mol_type = other RNA
  modified_base 1: mod_base = OTHER; note = 2'-O-methyluridine-3'-phosphate 5'phosphate
  modified_base 2: mod_base = OTHER; note = 2'-deoxy-2'-fluoroguanosine-3'-phosphate
  modified_base 3: mod_base = OTHER; note = 2'-O-methylcytidine-3'-phosphate
  modified_base 4: mod_base = OTHER; note = 2'-O-methyladenosine-3'-phosphate
  modified_base 5: mod_base = OTHER; note = 2'-O-methylguanosine-3'-phosphate
  modified_base 6: mod_base = OTHER; note = 2'-deoxy-2'-fluorouridine-3'-phosphate
  modified_base 7: mod_base = OTHER; note = 2'-O-methyluridine-3'-phosphate
  modified_base 8: mod_base = OTHER; note = 2'-O-methyluridine-3'-phosphate
  modified_base 9: mod_base = OTHER; note = 2'-O-methyluridine-3'-phosphate
  modified_base 10: mod_base = OTHER; note = 2'-O-methylguanosine-3'-phosphate
  modified_base 11: mod_base = OTHER; note = 2'-O-methylcytidine-3'-phosphate
  modified_base 12: mod_base = OTHER; note = 2'-O-methyluridine-3'-phosphate
  modified_base 13: mod_base = OTHER; note = 2'-O-methyluridine-3'-phosphate
  modified_base 14: mod_base = OTHER; note = 2'-deoxy-2'-fluorouridine-3'-phosphate
  modified_base 15: mod_base = OTHER; note = 2'-O-methyluridine-3'-phosphate
  modified_base 16: mod_base = OTHER; note = 2'-deoxy-2'-fluorocytidine-3'-phosphate
  modified_base 17: mod_base = OTHER; note = 2'-O-methyluridine-3'-phosphate
  modified_base 18: mod_base = OTHER; note = 2'-O-methylcytidine-3'-phosphate
  modified_base 19: mod_base = OTHER; note = 2'-O-methyluridine-3'-phosphate
  modified_base 20: mod_base = OTHER; note = 2'-O-methylguanosine-3'-phosphate
  modified_base 21: mod_base = OTHER; note = 2'-O-methylcytidine-3'-phosphate
  modified_base 22: mod_base = OTHER; note = 2'-O-methyladenosine-3'-phosphate
  modified_base 23: mod_base = OTHER; note = 2'-O-methyluridine
tgcagttttgcttttctctgcat

SEQ ID NO: 5622 - RNA, 23 nt, synthetic construct
  source 1..23: mol_type = other RNA
  modified_base 1: mod_base = OTHER; note = 2'-O-methyluridine-3'-phosphate 5'phosphate
  modified_base 2: mod_base = OTHER; note = 2'-deoxy-2'-fluorouridine-3'-phosphate
  modified_base 3: mod_base = OTHER; note = 2'-O-methylguanosine-3'-phosphate
  modified_base 4: mod_base = OTHER; note = 2'-O-methylcytidine-3'-phosphate
  modified_base 5: mod_base = OTHER; note = 2'-O-methyladenosine-3'-phosphate
  modified_base 6: mod_base = OTHER; note = 2'-deoxy-2'-fluoroguanosine-3'-phosphate
  modified_base 7: mod_base = OTHER; note = 2'-O-methyluridine-3'-phosphate
  modified_base 8: mod_base = OTHER; note = 2'-O-methyluridine-3'-phosphate
  modified_base 9: mod_base = OTHER; note = 2'-O-methyluridine-3'-phosphate
  modified_base 10: mod_base = OTHER; note = 2'-O-methyluridine-3'-phosphate
  modified_base 11: mod_base = OTHER; note = 2'-O-methylguanosine-3'-phosphate
  modified_base 12: mod_base = OTHER; note = 2'-O-methylcytidine-3'-phosphate
  modified_base 13: mod_base = OTHER; note = 2'-O-methyluridine-3'-phosphate
  modified_base 14: mod_base = OTHER; note = 2'-deoxy-2'-fluorouridine-3'-phosphate
  modified_base 15: mod_base = OTHER; note = 2'-O-methyluridine-3'-phosphate
  modified_base 16: mod_base = OTHER; note = 2'-deoxy-2'-fluorouridine-3'-phosphate
  modified_base 17: mod_base = OTHER; note = 2'-O-methylcytidine-3'-phosphate
  modified_base 18: mod_base = OTHER; note = 2'-O-methyluridine-3'-phosphate
  modified_base 19: mod_base = OTHER; note = 2'-O-methylcytidine-3'-phosphate
  modified_base 20: mod_base = OTHER; note = 2'-O-methyluridine-3'-phosphate
  modified_base 21: mod_base = OTHER; note = 2'-O-methylguanosine-3'-phosphate
  modified_base 22: mod_base = OTHER; note = 2'-O-methylcytidine-3'-phosphate
  modified_base 23: mod_base = OTHER; note = 2'-O-methyladenosine
ttgcagttttgcttttctctgca

SEQ ID NO: 5623 - RNA, 23 nt, synthetic construct
  source 1..23: mol_type = other RNA
  modified_base 1: mod_base = OTHER; note = 2'-O-methyluridine-3'-phosphate 5'phosphate
  modified_base 2: mod_base = OTHER; note = 2'-deoxy-2'-fluorouridine-3'-phosphate
  modified_base 3: mod_base = OTHER; note = 2'-O-methyluridine-3'-phosphate
  modified_base 4: mod_base = OTHER; note = 2'-O-methylguanosine-3'-phosphate
  modified_base 5: mod_base = OTHER; note = 2'-O-methylcytidine-3'-phosphate
  modified_base 6: mod_base = OTHER; note = 2'-deoxy-2'-fluoroadenosine-3'-phosphate
  modified_base 7: mod_base = OTHER; note = 2'-O-methylguanosine-3'-phosphate
  modified_base 8: mod_base = OTHER; note = 2'-O-methyluridine-3'-phosphate
  modified_base 9: mod_base = OTHER; note = 2'-O-methyluridine-3'-phosphate
  modified_base 10: mod_base = OTHER; note = 2'-O-methyluridine-3'-phosphate
  modified_base 11: mod_base = OTHER; note = 2'-O-methyluridine-3'-phosphate
  modified_base 12: mod_base = OTHER; note = 2'-O-methylguanosine-3'-phosphate
  modified_base 13: mod_base = OTHER; note = 2'-O-methylcytidine-3'-phosphate
  modified_base 14: mod_base = OTHER; note = 2'-deoxy-2'-fluorouridine-3'-phosphate
  modified_base 15: mod_base = OTHER; note = 2'-O-methyluridine-3'-phosphate
  modified_base 16: mod_base = OTHER; note = 2'-deoxy-2'-fluorouridine-3'-phosphate
  modified_base 17: mod_base = OTHER; note = 2'-O-methyluridine-3'-phosphate
  modified_base 18: mod_base = OTHER; note = 2'-O-methylcytidine-3'-phosphate
  modified_base 19: mod_base = OTHER; note = 2'-O-methyluridine-3'-phosphate
  modified_base 20: mod_base = OTHER; note = 2'-O-methylcytidine-3'-phosphate
  modified_base 21: mod_base = OTHER; note = 2'-O-methyluridine-3'-phosphate
  modified_base 22: mod_base = OTHER; note = 2'-O-methylguanosine-3'-phosphate
  modified_base 23: mod_base = OTHER; note = 2'-O-methylcytidine
tttgcagttttgcttttctctgc

SEQ ID NO: 5624 - RNA, 23 nt, synthetic construct
  source 1..23: mol_type = other RNA
  modified_base 1: mod_base = OTHER; note = 2'-O-methyluridine-3'-phosphate 5'phosphate
  modified_base 2: mod_base = OTHER; note = 2'-deoxy-2'-fluoroadenosine-3'-phosphate
  modified_base 3: mod_base = OTHER; note = 2'-O-methylcytidine-3'-phosphate
  modified_base 4: mod_base = OTHER; note = 2'-O-methyluridine-3'-phosphate
  modified_base 5: mod_base = OTHER; note = 2'-O-methyluridine-3'-phosphate
  modified_base 6: mod_base = OTHER; note = 2'-deoxy-2'-fluoroguanosine-3'-phosphate
  modified_base 7: mod_base = OTHER; note = 2'-O-methylcytidine-3'-phosphate
  modified_base 8: mod_base = OTHER; note = 2'-O-methyladenosine-3'-phosphate
  modified_base 9: mod_base = OTHER; note = 2'-O-methylguanosine-3'-phosphate
  modified_base 10: mod_base = OTHER; note = 2'-O-methyluridine-3'-phosphate
  modified_base 11: mod_base = OTHER; note = 2'-O-methyluridine-3'-phosphate
  modified_base 12: mod_base = OTHER; note = 2'-O-methyluridine-3'-phosphate
  modified_base 13: mod_base = OTHER; note = 2'-O-methyluridine-3'-phosphate
  modified_base 14: mod_base = OTHER; note = 2'-deoxy-2'-fluoroguanosine-3'-phosphate
  modified_base 15: mod_base = OTHER; note = 2'-O-methylcytidine-3'-phosphate
  modified_base 16: mod_base = OTHER; note = 2'-deoxy-2'-fluorouridine-3'-phosphate
  modified_base 17: mod_base = OTHER; note = 2'-O-methyluridine-3'-phosphate
  modified_base 18: mod_base = OTHER; note = 2'-O-methyluridine-3'-phosphate
  modified_base 19: mod_base = OTHER; note = 2'-O-methyluridine-3'-phosphate
  modified_base 20: mod_base = OTHER; note = 2'-O-methylcytidine-3'-phosphate
  modified_base 21: mod_base = OTHER; note = 2'-O-methyluridine-3'-phosphate
  modified_base 22: mod_base = OTHER; note = 2'-O-methylcytidine-3'-phosphate
  modified_base 23: mod_base = OTHER; note = 2'-O-methyluridine
tacttgcagttttgcttttctct

SEQ ID NO: 5625 - RNA, 23 nt, synthetic construct
  source 1..23: mol_type = other RNA
  modified_base 1: mod_base = OTHER; note = 2'-O-methyluridine-3'-phosphate 5'phosphate
  modified_base 2: mod_base = OTHER; note = 2'-deoxy-2'-fluorouridine-3'-phosphate
  modified_base 3: mod_base = OTHER; note = 2'-O-methylcytidine-3'-phosphate
  modified_base 4: mod_base = OTHER; note = 2'-O-methyladenosine-3'-phosphate
  modified_base 5: mod_base = OTHER; note = 2'-O-methylcytidine-3'-phosphate
  modified_base 6: mod_base = OTHER; note = 2'-deoxy-2'-fluorouridine-3'-phosphate
  modified_base 7: mod_base = OTHER; note = 2'-O-methyluridine-3'-phosphate
  modified_base 8: mod_base = OTHER; note = 2'-O-methylguanosine-3'-phosphate
  modified_base 9: mod_base = OTHER; note = 2'-O-methylcytidine-3'-phosphate
  modified_base 10: mod_base = OTHER; note = 2'-O-methyladenosine-3'-phosphate
  modified_base 11: mod_base = OTHER; note = 2'-O-methylguanosine-3'-phosphate
  modified_base 12: mod_base = OTHER; note = 2'-O-methyluridine-3'-phosphate
  modified_base 13: mod_base = OTHER; note = 2'-O-methyluridine-3'-phosphate
  modified_base 14: mod_base = OTHER; note = 2'-deoxy-2'-fluorouridine-3'-phosphate
  modified_base 15: mod_base = OTHER; note = 2'-O-methyluridine-3'-phosphate
  modified_base 16: mod_base = OTHER; note = 2'-deoxy-2'-fluoroguanosine-3'-phosphate
  modified_base 17: mod_base = OTHER; note = 2'-O-methylcytidine-3'-phosphate
  modified_base 18: mod_base = OTHER; note = 2'-O-methyluridine-3'-phosphate
  modified_base 19: mod_base = OTHER; note = 2'-O-methyluridine-3'-phosphate
  modified_base 20: mod_base = OTHER; note = 2'-O-methyluridine-3'-phosphate
  modified_base 21: mod_base = OTHER; note = 2'-O-methyluridine-3'-phosphate
  modified_base 22: mod_base = OTHER; note = 2'-O-methylcytidine-3'-phosphate
  modified_base 23: mod_base = OTHER; note = 2'-O-methyluridine
ttcacttgcagttttgcttttct

SEQ ID NO: 5626 - RNA, 23 nt, synthetic construct
  source 1..23: mol_type = other RNA
  modified_base 1: mod_base = OTHER; note = 2'-O-methyluridine-3'-phosphate 5'phosphate
  modified_base 2: mod_base = OTHER; note = 2'-deoxy-2'-fluoroguanosine-3'-phosphate
  modified_base 3: mod_base = OTHER; note = 2'-O-methyluridine-3'-phosphate
  modified_base 4: mod_base = OTHER; note = 2'-O-methylcytidine-3'-phosphate
  modified_base 5: mod_base = OTHER; note = 2'-O-methyladenosine-3'-phosphate
  modified_base 6: mod_base = OTHER; note = 2'-deoxy-2'-fluorocytidine-3'-phosphate
  modified_base 7: mod_base = OTHER; note = 2'-O-methyluridine-3'-phosphate
  modified_base 8: mod_base = OTHER; note = 2'-O-methyluridine-3'-phosphate
  modified_base 9: mod_base = OTHER; note = 2'-O-methylguanosine-3'-phosphate
  modified_base 10: mod_base = OTHER; note = 2'-O-methylcytidine-3'-phosphate
  modified_base 11: mod_base = OTHER; note = 2'-O-methyladenosine-3'-phosphate
  modified_base 12: mod_base = OTHER; note = 2'-O-methylguanosine-3'-phosphate
  modified_base 13: mod_base = OTHER; note = 2'-O-methyluridine-3'-phosphate
  modified_base 14: mod_base = OTHER; note = 2'-deoxy-2'-fluorouridine-3'-phosphate
  modified_base 15: mod_base = OTHER; note = 2'-O-methyluridine-3'-phosphate
  modified_base 16: mod_base = OTHER; note = 2'-deoxy-2'-fluorouridine-3'-phosphate
  modified_base 17: mod_base = OTHER; note = 2'-O-methylguanosine-3'-phosphate
  modified_base 18: mod_base = OTHER; note = 2'-O-methylcytidine-3'-phosphate
  modified_base 19: mod_base = OTHER; note = 2'-O-methyluridine-3'-phosphate
  modified_base 20: mod_base = OTHER; note = 2'-O-methyluridine-3'-phosphate
  modified_base 21: mod_base = OTHER; note = 2'-O-methyluridine-3'-phosphate
  modified_base 22: mod_base = OTHER; note = 2'-O-methyluridine-3'-phosphate
  modified_base 23: mod_base = OTHER; note = 2'-O-methylcytidine
tgtcacttgcagttttgcttttc

SEQ ID NO: 5627 - RNA, 23 nt, synthetic construct
  source 1..23: mol_type = other RNA
  modified_base 1: mod_base = OTHER; note = 2'-O-methyluridine-3'-phosphate 5'phosphate
  modified_base 2: mod_base = OTHER; note = 2'-deoxy-2'-fluoroadenosine-3'-phosphate
  modified_base 3: mod_base = OTHER; note = 2'-O-methylguanosine-3'-phosphate
  modified_base 4: mod_base = OTHER; note = 2'-O-methyluridine-3'-phosphate
  modified_base 5: mod_base = OTHER; note = 2'-O-methylcytidine-3'-phosphate
  modified_base 6: mod_base = OTHER; note = 2'-deoxy-2'-fluoroadenosine-3'-phosphate
  modified_base 7: mod_base = OTHER; note = 2'-O-methylcytidine-3'-phosphate
  modified_base 8: mod_base = OTHER; note = 2'-O-methyluridine-3'-phosphate
  modified_base 9: mod_base = OTHER; note = 2'-O-methyluridine-3'-phosphate
  modified_base 10: mod_base = OTHER; note = 2'-O-methylguanosine-3'-phosphate
  modified_base 11: mod_base = OTHER; note = 2'-O-methylcytidine-3'-phosphate
  modified_base 12: mod_base = OTHER; note = 2'-O-methyladenosine-3'-phosphate
  modified_base 13: mod_base = OTHER; note = 2'-O-methylguanosine-3'-phosphate
  modified_base 14: mod_base = OTHER; note = 2'-deoxy-2'-fluorouridine-3'-phosphate
  modified_base 15: mod_base = OTHER; note = 2'-O-methyluridine-3'-phosphate
  modified_base 16: mod_base = OTHER; note = 2'-deoxy-2'-fluorouridine-3'-phosphate
  modified_base 17: mod_base = OTHER; note = 2'-O-methyluridine-3'-phosphate
  modified_base 18: mod_base = OTHER; note = 2'-O-methylguanosine-3'-phosphate
  modified_base 19: mod_base = OTHER; note = 2'-O-methylcytidine-3'-phosphate
  modified_base 20: mod_base = OTHER; note = 2'-O-methyluridine-3'-phosphate
  modified_base 21: mod_base = OTHER; note = 2'-O-methyluridine-3'-phosphate
  modified_base 22: mod_base = OTHER; note = 2'-O-methyluridine-3'-phosphate
  modified_base 23: mod_base = OTHER; note = 2'-O-methyluridine
tagtcacttgcagttttgctttt

SEQ ID NO: 5628 - RNA, 23 nt, synthetic construct
  source 1..23: mol_type = other RNA
  modified_base 1: mod_base = OTHER; note = 2'-O-methyluridine-3'-phosphate 5'phosphate
  modified_base 2: mod_base = OTHER; note = 2'-deoxy-2'-fluorouridine-3'-phosphate
  modified_base 3: mod_base = OTHER; note = 2'-O-methyluridine-3'-phosphate
  modified_base 4: mod_base = OTHER; note = 2'-O-methylcytidine-3'-phosphate
  modified_base 5: mod_base = OTHER; note = 2'-O-methyladenosine-3'-phosphate
  modified_base 6: mod_base = OTHER; note = 2'-deoxy-2'-fluorocytidine-3'-phosphate
  modified_base 7: mod_base = OTHER; note = 2'-O-methyladenosine-3'-phosphate
  modified_base 8: mod_base = OTHER; note = 2'-O-methylguanosine-3'-phosphate
  modified_base 9: mod_base = OTHER; note = 2'-O-methyluridine-3'-phosphate
  modified_base 10: mod_base = OTHER; note = 2'-O-methylcytidine-3'-phosphate
  modified_base 11: mod_base = OTHER; note = 2'-O-methyladenosine-3'-phosphate
  modified_base 12: mod_base = OTHER; note = 2'-O-methylcytidine-3'-phosphate
  modified_base 13: mod_base = OTHER; note = 2'-O-methyluridine-3'-phosphate
  modified_base 14: mod_base = OTHER; note = 2'-deoxy-2'-fluorouridine-3'-phosphate
  modified_base 15: mod_base = OTHER; note = 2'-O-methylguanosine-3'-phosphate
  modified_base 16: mod_base = OTHER; note = 2'-deoxy-2'-fluorocytidine-3'-phosphate
  modified_base 17: mod_base = OTHER; note = 2'-O-methyladenosine-3'-phosphate
  modified_base 18: mod_base = OTHER; note = 2'-O-methylguanosine-3'-phosphate
  modified_base 19: mod_base = OTHER; note = 2'-O-methyluridine-3'-phosphate
  modified_base 20: mod_base = OTHER; note = 2'-O-methyluridine-3'-phosphate
  modified_base 21: mod_base = OTHER; note = 2'-O-methyluridine-3'-phosphate
  modified_base 22: mod_base = OTHER; note = 2'-O-methyluridine-3'-phosphate
  modified_base 23: mod_base = OTHER; note = 2'-O-methylguanosine
tttcacagtcacttgcagttttg

SEQ ID NO: 5629 - RNA, 23 nt, synthetic construct
  source 1..23: mol_type = other RNA
  modified_base 1: mod_base = OTHER; note = 2'-O-methyluridine-3'-phosphate 5'phosphate
  modified_base 2: mod_base = OTHER; note = 2'-deoxy-2'-fluoroadenosine-3'-phosphate
  modified_base 3: mod_base = OTHER; note = 2'-O-methyluridine-3'-phosphate
  modified_base 4: mod_base = OTHER; note = 2'-O-methyluridine-3'-phosphate
  modified_base 5: mod_base = OTHER; note = 2'-O-methylcytidine-3'-phosphate
  modified_base 6: mod_base = OTHER; note = 2'-deoxy-2'-fluoroadenosine-3'-phosphate
  modified_base 7: mod_base = OTHER; note = 2'-O-methylcytidine-3'-phosphate
  modified_base 8: mod_base = OTHER; note = 2'-O-methyladenosine-3'-phosphate
  modified_base 9: mod_base = OTHER; note = 2'-O-methylguanosine-3'-phosphate
  modified_base 10: mod_base = OTHER; note = 2'-O-methyluridine-3'-phosphate
  modified_base 11: mod_base = OTHER; note = 2'-O-methylcytidine-3'-phosphate
  modified_base 12: mod_base = OTHER; note = 2'-O-methyladenosine-3'-phosphate
  modified_base 13: mod_base = OTHER; note = 2'-O-methylcytidine-3'-phosphate
  modified_base 14: mod_base = OTHER; note = 2'-deoxy-2'-fluorouridine-3'-phosphate
  modified_base 15: mod_base = OTHER; note = 2'-O-methyluridine-3'-phosphate
  modified_base 16: mod_base = OTHER; note = 2'-deoxy-2'-fluoroguanosine-3'-phosphate
  modified_base 17: mod_base = OTHER; note = 2'-O-methylcytidine-3'-phosphate
  modified_base 18: mod_base = OTHER; note = 2'-O-methyladenosine-3'-phosphate
  modified_base 19: mod_base = OTHER; note = 2'-O-methylguanosine-3'-phosphate
  modified_base 20: mod_base = OTHER; note = 2'-O-methyluridine-3'-phosphate
  modified_base 21: mod_base = OTHER; note = 2'-O-methyluridine-3'-phosphate
  modified_base 22: mod_base = OTHER; note = 2'-O-methyluridine-3'-phosphate
  modified_base 23: mod_base = OTHER; note = 2'-O-methyluridine
tattcacagtcacttgcagtttt

SEQ ID NO: 5630 - RNA, 23 nt, synthetic construct
  source 1..23: mol_type = other RNA
  modified_base 1: mod_base = OTHER; note = 2'-O-methyluridine-3'-phosphate 5'phosphate
  modified_base 2: mod_base = OTHER; note = 2'-deoxy-2'-fluorouridine-3'-phosphate
  modified_base 3: mod_base = OTHER; note = 2'-O-methyladenosine-3'-phosphate
  modified_base 4: mod_base = OTHER; note = 2'-O-methyluridine-3'-phosphate
  modified_base 5: mod_base = OTHER; note = 2'-O-methyluridine-3'-phosphate
  modified_base 6: mod_base = OTHER; note = 2'-deoxy-2'-fluorocytidine-3'-phosphate
  modified_base 7: mod_base = OTHER; note = 2'-O-methyladenosine-3'-phosphate
  modified_base 8: mod_base = OTHER; note = 2'-O-methylcytidine-3'-phosphate
  modified_base 9: mod_base = OTHER; note = 2'-O-methyladenosine-3'-phosphate
  modified_base 10: mod_base = OTHER; note = 2'-O-methylguanosine-3'-phosphate
  modified_base 11: mod_base = OTHER; note = 2'-O-methyluridine-3'-phosphate
  modified_base 12: mod_base = OTHER; note = 2'-O-methylcytidine-3'-phosphate
  modified_base 13: mod_base = OTHER; note = 2'-O-methyladenosine-3'-phosphate
  modified_base 14: mod_base = OTHER; note = 2'-deoxy-2'-fluorocytidine-3'-phosphate
  modified_base 15: mod_base = OTHER; note = 2'-O-methyluridine-3'-phosphate
  modified_base 16: mod_base = OTHER; note = 2'-deoxy-2'-fluorouridine-3'-phosphate
  modified_base 17: mod_base = OTHER; note = 2'-O-methylguanosine-3'-phosphate
  modified_base 18: mod_base = OTHER; note = 2'-O-methylcytidine-3'-phosphate
  modified_base 19: mod_base = OTHER; note = 2'-O-methyladenosine-3'-phosphate
  modified_base 20: mod_base = OTHER; note = 2'-O-methylguanosine-3'-phosphate
  modified_base 21: mod_base = OTHER; note = 2'-O-methyluridine-3'-phosphate
  modified_base 22: mod_base = OTHER; note = 2'-O-methyluridine-3'-phosphate
  modified_base 23: mod_base = OTHER; note = 2'-O-methyluridine
ttattcacagtcacttgcagttt

SEQ ID NO: 5631 - RNA, 23 nt, synthetic construct
  source 1..23: mol_type = other RNA
  modified_base 1: mod_base = OTHER; note = 2'-O-methyluridine-3'-phosphate 5'phosphate
  modified_base 2: mod_base = OTHER; note = 2'-deoxy-2'-fluorouridine-3'-phosphate
  modified_base 3: mod_base = OTHER; note = 2'-O-methyluridine-3'-phosphate
  modified_base 4: mod_base = OTHER; note = 2'-O-methyladenosine-3'-phosphate
  modified_base 5: mod_base = OTHER; note = 2'-O-methyluridine-3'-phosphate
  modified_base 6: mod_base = OTHER; note = 2'-deoxy-2'-fluorouridine-3'-phosphate
  modified_base 7: mod_base = OTHER; note = 2'-O-methylcytidine-3'-phosphate
  modified_base 8: mod_base = OTHER; note = 2'-O-methyladenosine-3'-phosphate
  modified_base 9: mod_base = OTHER; note = 2'-O-methylcytidine-3'-phosphate
  modified_base 10: mod_base = OTHER; note = 2'-O-methyladenosine-3'-phosphate
  modified_base 11: mod_base = OTHER; note = 2'-O-methylguanosine-3'-phosphate
  modified_base 12: mod_base = OTHER; note = 2'-O-methyluridine-3'-phosphate
  modified_base 13: mod_base = OTHER; note = 2'-O-methylcytidine-3'-phosphate
  modified_base 14: mod_base = OTHER; note = 2'-deoxy-2'-fluoroadenosine-3'-phosphate
  modified_base 15: mod_base = OTHER; note = 2'-O-methylcytidine-3'-phosphate
  modified_base 16: mod_base = OTHER; note = 2'-deoxy-2'-fluorouridine-3'-phosphate
  modified_base 17: mod_base = OTHER; note = 2'-O-methyluridine-3'-phosphate
  modified_base 18: mod_base = OTHER; note = 2'-O-methylguanosine-3'-phosphate
  modified_base 19: mod_base = OTHER; note = 2'-O-methylcytidine-3'-phosphate
  modified_base 20: mod_base = OTHER; note = 2'-O-methyladenosine-3'-phosphate
  modified_base 21: mod_base = OTHER; note = 2'-O-methylguanosine-3'-phosphate
  modified_base 22: mod_base = OTHER; note = 2'-O-methyluridine-3'-phosphate
  modified_base 23: mod_base = OTHER; note = 2'-O-methyluridine
tttattcacagtcacttgcagtt

SEQ ID NO: 5632 - RNA, 23 nt, synthetic construct
  source 1..23: mol_type = other RNA
  modified_base 1: mod_base = OTHER; note = 2'-O-methyluridine-3'-phosphate 5'phosphate
  modified_base 2: mod_base = OTHER; note = 2'-deoxy-2'-fluorouridine-3'-phosphate
  modified_base 3: mod_base = OTHER; note = 2'-O-methyluridine-3'-phosphate
  modified_base 4: mod_base = OTHER; note = 2'-O-methyluridine-3'-phosphate
  modified_base 5: mod_base = OTHER; note = 2'-O-methyladenosine-3'-phosphate
  modified_base 6: mod_base = OTHER; note = 2'-deoxy-2'-fluorouridine-3'-phosphate
  modified_base 7: mod_base = OTHER; note = 2'-O-methyluridine-3'-phosphate
  modified_base 8: mod_base = OTHER; note = 2'-O-methylcytidine-3'-phosphate
  modified_base 9: mod_base = OTHER; note = 2'-O-methyladenosine-3'-phosphate
  modified_base 10: mod_base = OTHER; note = 2'-O-methylcytidine-3'-phosphate
  modified_base 11: mod_base = OTHER; note = 2'-O-methyladenosine-3'-phosphate
  modified_base 12: mod_base = OTHER; note = 2'-O-methylguanosine-3'-phosphate
  modified_base 13: mod_base = OTHER; note = 2'-O-methyluridine-3'-phosphate
  modified_base 14: mod_base = OTHER; note = 2'-deoxy-2'-fluorocytidine-3'-phosphate
  modified_base 15: mod_base = OTHER; note = 2'-O-methyladenosine-3'-phosphate
  modified_base 16: mod_base = OTHER; note = 2'-deoxy-2'-fluorocytidine-3'-phosphate
  modified_base 17: mod_base = OTHER; note = 2'-O-methyluridine-3'-phosphate
  modified_base 18: mod_base = OTHER; note = 2'-O-methyluridine-3'-phosphate
  modified_base 19: mod_base = OTHER; note = 2'-O-methylguanosine-3'-phosphate
  modified_base 20: mod_base = OTHER; note = 2'-O-methylcytidine-3'-phosphate
  modified_base 21: mod_base = OTHER; note = 2'-O-methyladenosine-3'-phosphate
  modified_base 22: mod_base = OTHER; note = 2'-O-methylguanosine-3'-phosphate
  modified_base 23: mod_base = OTHER; note = 2'-O-methyluridine
ttttattcacagtcacttgcagt

SEQ ID NO: 5633 - RNA, 23 nt, synthetic construct
  source 1..23: mol_type = other RNA
  modified_base 1: mod_base = OTHER; note = 2'-O-methyluridine-3'-phosphate 5'phosphate
  modified_base 2: mod_base = OTHER; note = 2'-deoxy-2'-fluorocytidine-3'-phosphate
  modified_base 3: mod_base = OTHER; note = 2'-O-methyluridine-3'-phosphate
  modified_base 4: mod_base = OTHER; note = 2'-O-methyluridine-3'-phosphate
  modified_base 5: mod_base = OTHER; note = 2'-O-methyluridine-3'-phosphate
  modified_base 6: mod_base = OTHER; note = 2'-deoxy-2'-fluoroadenosine-3'-phosphate
  modified_base 7: mod_base = OTHER; note = 2'-O-methyluridine-3'-phosphate
  modified_base 8: mod_base = OTHER; note = 2'-O-methyluridine-3'-phosphate
  modified_base 9: mod_base = OTHER; note = 2'-O-methylcytidine-3'-phosphate
  modified_base 10: mod_base = OTHER; note = 2'-O-methyladenosine-3'-phosphate
  modified_base 11: mod_base = OTHER; note = 2'-O-methylcytidine-3'-phosphate
  modified_base 12: mod_base = OTHER; note = 2'-O-methyladenosine-3'-phosphate
  modified_base 13: mod_base = OTHER; note = 2'-O-methylguanosine-3'-phosphate
  modified_base 14: mod_base = OTHER; note = 2'-deoxy-2'-fluorouridine-3'-phosphate
  modified_base 15: mod_base = OTHER; note = 2'-O-methylcytidine-3'-phosphate
  modified_base 16: mod_base = OTHER; note = 2'-deoxy-2'-fluoroadenosine-3'-phosphate
  modified_base 17: mod_base = OTHER; note = 2'-O-methylcytidine-3'-phosphate
  modified_base 18: mod_base = OTHER; note = 2'-O-methyluridine-3'-phosphate
  modified_base 19: mod_base = OTHER; note = 2'-O-methyluridine-3'-phosphate
  modified_base 20: mod_base = OTHER; note = 2'-O-methylguanosine-3'-phosphate
  modified_base 21: mod_base = OTHER; note = 2'-O-methylcytidine-3'-phosphate
  modified_base 22: mod_base = OTHER; note = 2'-O-methyladenosine-3'-phosphate
  modified_base 23: mod_base = OTHER; note = 2'-O-methylguanosine
tctttattcacagtcacttgcag

SEQ ID NO: 5634 - RNA, 23 nt, synthetic construct
  source 1..23: mol_type = other RNA
  modified_base 1: mod_base = OTHER; note = 2'-O-methyluridine-3'-phosphate 5'phosphate
  modified_base 2: mod_base = OTHER; note = 2'-deoxy-2'-fluorocytidine-3'-phosphate
  modified_base 3: mod_base = OTHER; note = 2'-O-methylcytidine-3'-phosphate
  modified_base 4: mod_base = OTHER; note = 2'-O-methyluridine-3'-phosphate
  modified_base 5: mod_base = OTHER; note = 2'-O-methyluridine-3'-phosphate
  modified_base 6: mod_base = OTHER; note = 2'-deoxy-2'-fluorouridine-3'-phosphate
  modified_base 7: mod_base = OTHER; note = 2'-O-methyladenosine-3'-phosphate
  modified_base 8: mod_base = OTHER; note = 2'-O-methyluridine-3'-phosphate
  modified_base 9: mod_base = OTHER; note = 2'-O-methyluridine-3'-phosphate
  modified_base 10: mod_base = OTHER; note = 2'-O-methylcytidine-3'-phosphate
  modified_base 11: mod_base = OTHER; note = 2'-O-methyladenosine-3'-phosphate
  modified_base 12: mod_base = OTHER; note = 2'-O-methylcytidine-3'-phosphate
  modified_base 13: mod_base = OTHER; note = 2'-O-methyladenosine-3'-phosphate
  modified_base 14: mod_base = OTHER; note = 2'-deoxy-2'-fluoroguanosine-3'-phosphate
  modified_base 15: mod_base = OTHER; note = 2'-O-methyluridine-3'-phosphate
  modified_base 16: mod_base = OTHER; note = 2'-deoxy-2'-fluorocytidine-3'-phosphate
  modified_base 17: mod_base = OTHER; note = 2'-O-methyladenosine-3'-phosphate
  modified_base 18: mod_base = OTHER; note = 2'-O-methylcytidine-3'-phosphate
  modified_base 19: mod_base = OTHER; note = 2'-O-methyluridine-3'-phosphate
  modified_base 20: mod_base = OTHER; note = 2'-O-methyluridine-3'-phosphate
  modified_base 21: mod_base = OTHER; note = 2'-O-methylguanosine-3'-phosphate
  modified_base 22: mod_base = OTHER; note = 2'-O-methylcytidine-3'-phosphate
  modified_base 23: mod_base = OTHER; note = 2'-O-methyladenosine
tcctttattcacagtcacttgca

SEQ ID NO: 5635 - RNA, 23 nt, synthetic construct
  source 1..23: mol_type = other RNA
  modified_base 1: mod_base = OTHER; note = 2'-O-methyluridine-3'-phosphate 5'phosphate
  modified_base 2: mod_base = OTHER; note = 2'-deoxy-2'-fluorouridine-3'-phosphate
  modified_base 3: mod_base = OTHER; note = 2'-O-methyluridine-3'-phosphate
  modified_base 4: mod_base = OTHER; note = 2'-O-methylcytidine-3'-phosphate
  modified_base 5: mod_base = OTHER; note = 2'-O-methyladenosine-3'-phosphate
  modified_base 6: mod_base = OTHER; note = 2'-deoxy-2'-fluorocytidine-3'-phosphate
  modified_base 7: mod_base = OTHER; note = 2'-O-methylcytidine-3'-phosphate
  modified_base 8: mod_base = OTHER; note = 2'-O-methylcytidine-3'-phosphate
  modified_base 9: mod_base = OTHER; note = 2'-O-methyluridine-3'-phosphate
  modified_base 10: mod_base = OTHER; note = 2'-O-methyluridine-3'-phosphate
  modified_base 11: mod_base = OTHER; note = 2'-O-methyluridine-3'-phosphate
  modified_base 12: mod_base = OTHER; note = 2'-O-methyladenosine-3'-phosphate
  modified_base 13: mod_base = OTHER; note = 2'-O-methyluridine-3'-phosphate
  modified_base 14: mod_base = OTHER; note = 2'-deoxy-2'-fluorouridine-3'-phosphate
  modified_base 15: mod_base = OTHER; note = 2'-O-methylcytidine-3'-phosphate
  modified_base 16: mod_base = OTHER; note = 2'-deoxy-2'-fluoroadenosine-3'-phosphate
  modified_base 17: mod_base = OTHER; note = 2'-O-methylcytidine-3'-phosphate
  modified_base 18: mod_base = OTHER; note = 2'-O-methyladenosine-3'-phosphate
  modified_base 19: mod_base = OTHER; note = 2'-O-methylguanosine-3'-phosphate
  modified_base 20: mod_base = OTHER; note = 2'-O-methyluridine-3'-phosphate
  modified_base 21: mod_base = OTHER; note = 2'-O-methylcytidine-3'-phosphate
  modified_base 22: mod_base = OTHER; note = 2'-O-methyladenosine-3'-phosphate
  modified_base 23: mod_base = OTHER; note = 2'-O-methylcytidine
tttcaccctttattcacagtcac

SEQ ID NO: 5636 - RNA, 23 nt, synthetic construct
  source 1..23: mol_type = other RNA
  modified_base 1: mod_base = OTHER; note = 2'-O-methyluridine-3'-phosphate 5'phosphate
  modified_base 2: mod_base = OTHER; note = 2'-deoxy-2'-fluoroadenosine-3'-phosphate
  modified_base 3: mod_base = OTHER; note = 2'-O-methyluridine-3'-phosphate
  modified_base 4: mod_base = OTHER; note = 2'-O-methyluridine-3'-phosphate
  modified_base 5: mod_base = OTHER; note = 2'-O-methylcytidine-3'-phosphate
  modified_base 6: mod_base = OTHER; note = 2'-deoxy-2'-fluoroadenosine-3'-phosphate
  modified_base 7: mod_base = OTHER; note = 2'-O-methylcytidine-3'-phosphate
  modified_base 8: mod_base = OTHER; note = 2'-O-methylcytidine-3'-phosphate
  modified_base 9: mod_base = OTHER; note = 2'-O-methylcytidine-3'-phosphate
  modified_base 10: mod_base = OTHER; note = 2'-O-methyluridine-3'-phosphate
  modified_base 11: mod_base = OTHER; note = 2'-O-methyluridine-3'-phosphate
  modified_base 12: mod_base = OTHER; note = 2'-O-methyluridine-3'-phosphate
  modified_base 13: mod_base = OTHER; note = 2'-O-methyladenosine-3'-phosphate
  modified_base 14: mod_base = OTHER; note = 2'-deoxy-2'-fluorouridine-3'-phosphate
  modified_base 15: mod_base = OTHER; note = 2'-O-methyluridine-3'-phosphate
  modified_base 16: mod_base = OTHER; note = 2'-deoxy-2'-fluorocytidine-3'-phosphate
  modified_base 17: mod_base = OTHER; note = 2'-O-methyladenosine-3'-phosphate
  modified_base 18: mod_base = OTHER; note = 2'-O-methylcytidine-3'-phosphate
  modified_base 19: mod_base = OTHER; note = 2'-O-methyladenosine-3'-phosphate
  modified_base 20: mod_base = OTHER; note = 2'-O-methylguanosine-3'-phosphate
  modified_base 21: mod_base = OTHER; note = 2'-O-methyluridine-3'-phosphate
  modified_base 22: mod_base = OTHER; note = 2'-O-methylcytidine-3'-phosphate
  modified_base 23: mod_base = OTHER; note = 2'-O-methyladenosine
tattcaccctttattcacagtca

SEQ ID NO: 5637 - RNA, 23 nt, synthetic construct
  source 1..23: mol_type = other RNA
  modified_base 1: mod_base = OTHER; note = 2'-O-methyluridine-3'-phosphate 5'phosphate
  modified_base 2: mod_base = OTHER; note = 2'-deoxy-2'-fluorouridine-3'-phosphate
  modified_base 3: mod_base = OTHER; note = 2'-O-methyladenosine-3'-phosphate
  modified_base 4: mod_base = OTHER; note = 2'-O-methylcytidine-3'-phosphate
  modified_base 5: mod_base = OTHER; note = 2'-O-methyladenosine-3'-phosphate
  modified_base 6: mod_base = OTHER; note = 2'-deoxy-2'-fluorouridine-3'-phosphate
  modified_base 7: mod_base = OTHER; note = 2'-O-methyluridine-3'-phosphate
  modified_base 8: mod_base = OTHER; note = 2'-O-methylcytidine-3'-phosphate
  modified_base 9: mod_base = OTHER; note = 2'-O-methyladenosine-3'-phosphate
  modified_base 10: mod_base = OTHER; note = 2'-O-methylcytidine-3'-phosphate
  modified_base 11: mod_base = OTHER; note = 2'-O-methylcytidine-3'-phosphate
  modified_base 12: mod_base = OTHER; note = 2'-O-methylcytidine-3'-phosphate
  modified_base 13: mod_base = OTHER; note = 2'-O-methyluridine-3'-phosphate
  modified_base 14: mod_base = OTHER; note = 2'-deoxy-2'-fluorouridine-3'-phosphate
  modified_base 15: mod_base = OTHER; note = 2'-O-methyluridine-3'-phosphate
  modified_base 16: mod_base = OTHER; note = 2'-deoxy-2'-fluoroadenosine-3'-phosphate
  modified_base 17: mod_base = OTHER; note = 2'-O-methyluridine-3'-phosphate
  modified_base 18: mod_base = OTHER; note = 2'-O-methyluridine-3'-phosphate
  modified_base 19: mod_base = OTHER; note = 2'-O-methylcytidine-3'-phosphate
  modified_base 20: mod_base = OTHER; note = 2'-O-methyladenosine-3'-phosphate
  modified_base 21: mod_base = OTHER; note = 2'-O-methylcytidine-3'-phosphate
  modified_base 22: mod_base = OTHER; note = 2'-O-methyladenosine-3'-phosphate
  modified_base 23: mod_base = OTHER; note = 2'-O-methylguanosine
ttacattcaccctttattcacag

SEQ ID NO: 5638 - RNA, 23 nt, synthetic construct
  source 1..23: mol_type = other RNA
  modified_base 1: mod_base = OTHER; note = 2'-O-methyluridine-3'-phosphate 5'phosphate
  modified_base 2: mod_base = OTHER; note = 2'-deoxy-2'-fluorocytidine-3'-phosphate
  modified_base 3: mod_base = OTHER; note = 2'-O-methyluridine-3'-phosphate
  modified_base 4: mod_base = OTHER; note = 2'-O-methyladenosine-3'-phosphate
  modified_base 5: mod_base = OTHER; note = 2'-O-methylcytidine-3'-phosphate
  modified_base 6: mod_base = OTHER; note = 2'-deoxy-2'-fluoroadenosine-3'-phosphate
  modified_base 7: mod_base = OTHER; note = 2'-O-methyluridine-3'-phosphate
  modified_base 8: mod_base = OTHER; note = 2'-O-methyluridine-3'-phosphate
  modified_base 9: mod_base = OTHER; note = 2'-O-methylcytidine-3'-phosphate
  modified_base 10: mod_base = OTHER; note = 2'-O-methyladenosine-3'-phosphate
  modified_base 11: mod_base = OTHER; note = 2'-O-methylcytidine-3'-phosphate
  modified_base 12: mod_base = OTHER; note = 2'-O-methylcytidine-3'-phosphate
  modified_base 13: mod_base = OTHER; note = 2'-O-methylcytidine-3'-phosphate
  modified_base 14: mod_base = OTHER; note = 2'-deoxy-2'-fluorouridine-3'-phosphate
  modified_base 15: mod_base = OTHER; note = 2'-O-methyluridine-3'-phosphate
  modified_base 16: mod_base = OTHER; note = 2'-deoxy-2'-fluorouridine-3'-phosphate
  modified_base 17: mod_base = OTHER; note = 2'-O-methyladenosine-3'-phosphate
  modified_base 18: mod_base = OTHER; note = 2'-O-methyluridine-3'-phosphate
  modified_base 19: mod_base = OTHER; note = 2'-O-methyluridine-3'-phosphate
  modified_base 20: mod_base = OTHER; note = 2'-O-methylcytidine-3'-phosphate
  modified_base 21: mod_base = OTHER; note = 2'-O-methyladenosine-3'-phosphate
  modified_base 22: mod_base = OTHER; note = 2'-O-methylcytidine-3'-phosphate
  modified_base 23: mod_base = OTHER; note = 2'-O-methyladenosine
tctacattcaccctttattcaca

SEQ ID NO: 5639 - RNA, 23 nt, synthetic construct
  source 1..23: mol_type = other RNA
  modified_base 1: mod_base = OTHER; note = 2'-O-methyluridine-3'-phosphate 5'phosphate
  modified_base 2: mod_base = OTHER; note = 2'-deoxy-2'-fluoroadenosine-3'-phosphate
  modified_base 3: mod_base = OTHER; note = 2'-O-methylcytidine-3'-phosphate
  modified_base 4: mod_base = OTHER; note = 2'-O-methyluridine-3'-phosphate
  modified_base 5: mod_base = OTHER; note = 2'-O-methyladenosine-3'-phosphate
  modified_base 6: mod_base = OTHER; note = 2'-deoxy-2'-fluorocytidine-3'-phosphate
  modified_base 7: mod_base = OTHER; note = 2'-O-methyladenosine-3'-phosphate
  modified_base 8: mod_base = OTHER; note = 2'-O-methyluridine-3'-phosphate
  modified_base 9: mod_base = OTHER; note = 2'-O-methyluridine-3'-phosphate
  modified_base 10: mod_base = OTHER; note = 2'-O-methylcytidine-3'-phosphate
  modified_base 11: mod_base = OTHER; note = 2'-O-methyladenosine-3'-phosphate
  modified_base 12: mod_base = OTHER; note = 2'-O-methylcytidine-3'-phosphate
  modified_base 13: mod_base = OTHER; note = 2'-O-methylcytidine-3'-phosphate
  modified_base 14: mod_base = OTHER; note = 2'-deoxy-2'-fluorocytidine-3'-phosphate
  modified_base 15: mod_base = OTHER; note = 2'-O-methyluridine-3'-phosphate
  modified_base 16: mod_base = OTHER; note = 2'-deoxy-2'-fluorouridine-3'-phosphate
  modified_base 17: mod_base = OTHER; note = 2'-O-methyluridine-3'-phosphate
  modified_base 18: mod_base = OTHER; note = 2'-O-methyladenosine-3'-phosphate
  modified_base 19: mod_base = OTHER; note = 2'-O-methyluridine-3'-phosphate
  modified_base 20: mod_base = OTHER; note = 2'-O-methyluridine-3'-phosphate
  modified_base 21: mod_base = OTHER; note = 2'-O-methylcytidine-3'-phosphate
  modified_base 22: mod_base = OTHER; note = 2'-O-methyladenosine-3'-phosphate
  modified_base 23: mod_base = OTHER; note = 2'-O-methylcytidine
tactacattcaccctttattcac

SEQ ID NO: 5640 - RNA, 23 nt, synthetic construct
  source 1..23: mol_type = other RNA
  modified_base 1: mod_base = OTHER; note = 2'-O-methyluridine-3'-phosphate 5'phosphate
  modified_base 2: mod_base = OTHER; note = 2'-deoxy-2'-fluoroguanosine-3'-phosphate
  modified_base 3: mod_base = OTHER; note = 2'-O-methyladenosine-3'-phosphate
  modified_base 4: mod_base = OTHER; note = 2'-O-methylguanosine-3'-phosphate
  modified_base 5: mod_base = OTHER; note = 2'-O-methyladenosine-3'-phosphate
  modified_base 6: mod_base = OTHER; note = 2'-deoxy-2'-fluorocytidine-3'-phosphate
  modified_base 7: mod_base = OTHER; note = 2'-O-methyluridine-3'-phosphate
  modified_base 8: mod_base = OTHER; note = 2'-O-methyladenosine-3'-phosphate
  modified_base 9: mod_base = OTHER; note = 2'-O-methylcytidine-3'-phosphate
  modified_base 10: mod_base = OTHER; note = 2'-O-methyladenosine-3'-phosphate
  modified_base 11: mod_base = OTHER; note = 2'-O-methyluridine-3'-phosphate
  modified_base 12: mod_base = OTHER; note = 2'-O-methyluridine-3'-phosphate
  modified_base 13: mod_base = OTHER; note = 2'-O-methylcytidine-3'-phosphate
  modified_base 14: mod_base = OTHER; note = 2'-deoxy-2'-fluoroadenosine-3'-phosphate
  modified_base 15: mod_base = OTHER; note = 2'-O-methylcytidine-3'-phosphate
  modified_base 16: mod_base = OTHER; note = 2'-deoxy-2'-fluorocytidine-3'-phosphate
  modified_base 17: mod_base = OTHER; note = 2'-O-methylcytidine-3'-phosphate
  modified_base 18: mod_base = OTHER; note = 2'-O-methyluridine-3'-phosphate
  modified_base 19: mod_base = OTHER; note = 2'-O-methyluridine-3'-phosphate
  modified_base 20: mod_base = OTHER; note = 2'-O-methyluridine-3'-phosphate
  modified_base 21: mod_base = OTHER; note = 2'-O-methyladenosine-3'-phosphate
  modified_base 22: mod_base = OTHER; note = 2'-O-methyluridine-3'-phosphate
  modified_base 23: mod_base = OTHER; note = 2'-O-methyluridine
tgagactacattcaccctttatt

SEQ ID NO: 5641 - RNA, 23 nt, synthetic construct
  source 1..23: mol_type = other RNA
  modified_base 1: mod_base = OTHER; note = 2'-O-methyluridine-3'-phosphate 5'phosphate
  modified_base 2: mod_base = OTHER; note = 2'-deoxy-2'-fluorouridine-3'-phosphate
  modified_base 3: mod_base = OTHER; note = 2'-O-methyluridine-3'-phosphate
  modified_base 4: mod_base = OTHER; note = 2'-O-methylguanosine-3'-phosphate
  modified_base 5: mod_base = OTHER; note = 2'-O-methyladenosine-3'-phosphate
  modified_base 6: mod_base = OTHER; note = 2'-deoxy-2'-fluoroguanosine-3'-phosphate
  modified_base 7: mod_base = OTHER; note = 2'-O-methyladenosine-3'-phosphate
  modified_base 8: mod_base = OTHER; note = 2'-O-methylcytidine-3'-phosphate
  modified_base 9: mod_base = OTHER; note = 2'-O-methyluridine-3'-phosphate
  modified_base 10: mod_base = OTHER; note = 2'-O-methyladenosine-3'-phosphate
  modified_base 11: mod_base = OTHER; note = 2'-O-methylcytidine-3'-phosphate
  modified_base 12: mod_base = OTHER; note = 2'-O-methyladenosine-3'-phosphate
  modified_base 13: mod_base = OTHER; note = 2'-O-methyluridine-3'-phosphate
  modified_base 14: mod_base = OTHER; note = 2'-deoxy-2'-fluorouridine-3'-phosphate
  modified_base 15: mod_base = OTHER; note = 2'-O-methylcytidine-3'-phosphate
  modified_base 16: mod_base = OTHER; note = 2'-deoxy-2'-fluoroadenosine-3'-phosphate
  modified_base 17: mod_base = OTHER; note = 2'-O-methylcytidine-3'-phosphate
  modified_base 18: mod_base = OTHER; note = 2'-O-methylcytidine-3'-phosphate
  modified_base 19: mod_base = OTHER; note = 2'-O-methylcytidine-3'-phosphate
  modified_base 20: mod_base = OTHER; note = 2'-O-methyluridine-3'-phosphate
  modified_base 21: mod_base = OTHER; note = 2'-O-methyluridine-3'-phosphate
  modified_base 22: mod_base = OTHER; note = 2'-O-methyluridine-3'-phosphate
  modified_base 23: mod_base = OTHER; note = 2'-O-methyladenosine
tttgagactacattcacccttta

SEQ ID NO: 5642 - RNA, 23 nt, synthetic construct
  source 1..23: mol_type = other RNA
  modified_base 1: mod_base = OTHER; note = 2'-O-methyluridine-3'-phosphate 5'phosphate
  modified_base 2: mod_base = OTHER; note = 2'-deoxy-2'-fluorouridine-3'-phosphate
  modified_base 3: mod_base = OTHER; note = 2'-O-methyluridine-3'-phosphate
  modified_base 4: mod_base = OTHER; note = 2'-O-methyluridine-3'-phosphate
  modified_base 5: mod_base = OTHER; note = 2'-O-methylguanosine-3'-phosphate
  modified_base 6: mod_base = OTHER; note = 2'-deoxy-2'-fluoroadenosine-3'-phosphate
  modified_base 7: mod_base = OTHER; note = 2'-O-methylguanosine-3'-phosphate
  modified_base 8: mod_base = OTHER; note = 2'-O-methyladenosine-3'-phosphate
  modified_base 9: mod_base = OTHER; note = 2'-O-methylcytidine-3'-phosphate
  modified_base 10: mod_base = OTHER; note = 2'-O-methyluridine-3'-phosphate
  modified_base 11: mod_base = OTHER; note = 2'-O-methyladenosine-3'-phosphate
  modified_base 12: mod_base = OTHER; note = 2'-O-methylcytidine-3'-phosphate
  modified_base 13: mod_base = OTHER; note = 2'-O-methyladenosine-3'-phosphate
  modified_base 14: mod_base = OTHER; note = 2'-deoxy-2'-fluorouridine-3'-phosphate
  modified_base 15: mod_base = OTHER; note = 2'-O-methyluridine-3'-phosphate
  modified_base 16: mod_base = OTHER; note = 2'-deoxy-2'-fluorocytidine-3'-phosphate
  modified_base 17: mod_base = OTHER; note = 2'-O-methyladenosine-3'-phosphate
  modified_base 18: mod_base = OTHER; note = 2'-O-methylcytidine-3'-phosphate
  modified_base 19: mod_base = OTHER; note = 2'-O-methylcytidine-3'-phosphate
  modified_base 20: mod_base = OTHER; note = 2'-O-methylcytidine-3'-phosphate
  modified_base 21: mod_base = OTHER; note = 2'-O-methyluridine-3'-phosphate
  modified_base 22: mod_base = OTHER; note = 2'-O-methyluridine-3'-phosphate
  modified_base 23: mod_base = OTHER; note = 2'-O-methyluridine
ttttgagactacattcacccttt

SEQ ID NO: 5643 - RNA, 23 nt, synthetic construct
  source 1..23: mol_type = other RNA
  modified_base 1: mod_base = OTHER; note = 2'-O-methyluridine-3'-phosphate 5'phosphate
  modified_base 2: mod_base = OTHER; note = 2'-deoxy-2'-fluoroadenosine-3'-phosphate
  modified_base 3: mod_base = OTHER; note = 2'-O-methyladenosine-3'-phosphate
  modified_base 4: mod_base = OTHER; note = 2'-O-methyladenosine-3'-phosphate
  modified_base 5: mod_base = OTHER; note = 2'-O-methylcytidine-3'-phosphate
  modified_base 6: mod_base = OTHER; note = 2'-deoxy-2'-fluoroadenosine-3'-phosphate
  modified_base 7: mod_base = OTHER; note = 2'-O-methylcytidine-3'-phosphate
  modified_base 8: mod_base = OTHER; note = 2'-O-methyladenosine-3'-phosphate
  modified_base 9: mod_base = OTHER; note = 2'-O-methylguanosine-3'-phosphate
  modified_base 10: mod_base = OTHER; note = 2'-O-methylcytidine-3'-phosphate
  modified_base 11: mod_base = OTHER; note = 2'-O-methyluridine-3'-phosphate
  modified_base 12: mod_base = OTHER; note = 2'-O-methylcytidine-3'-phosphate
  modified_base 13: mod_base = OTHER; note = 2'-O-methyluridine-3'-phosphate
  modified_base 14: mod_base = OTHER; note = 2'-deoxy-2'-fluorouridine-3'-phosphate
  modified_base 15: mod_base = OTHER; note = 2'-O-methyluridine-3'-phosphate
  modified_base 16: mod_base = OTHER; note = 2'-deoxy-2'-fluoroguanosine-3'-phosphate
  modified_base 17: mod_base = OTHER; note = 2'-O-methyladenosine-3'-phosphate
  modified_base 18: mod_base = OTHER; note = 2'-O-methylguanosine-3'-phosphate
  modified_base 19: mod_base = OTHER; note = 2'-O-methylguanosine-3'-phosphate
  modified_base 20: mod_base = OTHER; note = 2'-O-methyladenosine-3'-phosphate
  modified_base 21: mod_base = OTHER; note = 2'-O-methyluridine-3'-phosphate
  modified_base 22: mod_base = OTHER; note = 2'-O-methyluridine-3'-phosphate
  modified_base 23: mod_base = OTHER; note = 2'-O-methyluridine
taaacacagctctttgaggattt

SEQ ID NO: 5644 - RNA, 23 nt, synthetic construct
  source 1..23: mol_type = other RNA
  modified_base 1: mod_base = OTHER; note = 2'-O-methyluridine-3'-phosphate 5'phosphate
  modified_base 2: mod_base = OTHER; note = 2'-deoxy-2'-fluorouridine-3'-phosphate
  modified_base 3: mod_base = OTHER; note = 2'-O-methyladenosine-3'-phosphate
  modified_base 4: mod_base = OTHER; note = 2'-O-methyladenosine-3'-phosphate
  modified_base 5: mod_base = OTHER; note = 2'-O-methyladenosine-3'-phosphate
  modified_base 6: mod_base = OTHER; note = 2'-deoxy-2'-fluorocytidine-3'-phosphate
  modified_base 7: mod_base = OTHER; note = 2'-O-methyladenosine-3'-phosphate
  modified_base 8: mod_base = OTHER; note = 2'-O-methylcytidine-3'-phosphate
  modified_base 9: mod_base = OTHER; note = 2'-O-methyladenosine-3'-phosphate
  modified_base 10: mod_base = OTHER; note = 2'-O-methylguanosine-3'-phosphate
  modified_base 11: mod_base = OTHER; note = 2'-O-methylcytidine-3'-phosphate
  modified_base 12: mod_base = OTHER; note = 2'-O-methyluridine-3'-phosphate
  modified_base 13: mod_base = OTHER; note = 2'-O-methylcytidine-3'-phosphate
  modified_base 14: mod_base = OTHER; note = 2'-deoxy-2'-fluorouridine-3'-phosphate
  modified_base 15: mod_base = OTHER; note = 2'-O-methyluridine-3'-phosphate
  modified_base 16: mod_base = OTHER; note = 2'-deoxy-2'-fluorouridine-3'-phosphate
  modified_base 17: mod_base = OTHER; note = 2'-O-methylguanosine-3'-phosphate
  modified_base 18: mod_base = OTHER; note = 2'-O-methyladenosine-3'-phosphate
  modified_base 19: mod_base = OTHER; note = 2'-O-methylguanosine-3'-phosphate
  modified_base 20: mod_base = OTHER; note = 2'-O-methylguanosine-3'-phosphate
  modified_base 21: mod_base = OTHER; note = 2'-O-methyladenosine-3'-phosphate
  modified_base 22: mod_base = OTHER; note = 2'-O-methyluridine-3'-phosphate
  modified_base 23: mod_base = OTHER; note = 2'-O-methyluridine
ttaaacacagctctttgaggatt

SEQ ID NO: 5645 - RNA, 23 nt, synthetic construct
  source 1..23: mol_type = other RNA
  modified_base 1: mod_base = OTHER; note = 2'-O-methyluridine-3'-phosphate 5'phosphate
  modified_base 2: mod_base = OTHER; note = 2'-deoxy-2'-fluoroadenosine-3'-phosphate
  modified_base 3: mod_base = OTHER; note = 2'-O-methyluridine-3'-phosphate
  modified_base 4: mod_base = OTHER; note = 2'-O-methyladenosine-3'-phosphate
  modified_base 5: mod_base = OTHER; note = 2'-O-methyladenosine-3'-phosphate
  modified_base 6: mod_base = OTHER; note = 2'-deoxy-2'-fluoroadenosine-3'-phosphate
  modified_base 7: mod_base = OTHER; note = 2'-O-methylcytidine-3'-phosphate
  modified_base 8: mod_base = OTHER; note = 2'-O-methyladenosine-3'-phosphate
  modified_base 9: mod_base = OTHER; note = 2'-O-methylcytidine-3'-phosphate
  modified_base 10: mod_base = OTHER; note = 2'-O-methyladenosine-3'-phosphate
  modified_base 11: mod_base = OTHER; note = 2'-O-methylguanosine-3'-phosphate
  modified_base 12: mod_base = OTHER; note = 2'-O-methylcytidine-3'-phosphate
  modified_base 13: mod_base = OTHER; note = 2'-O-methyluridine-3'-phosphate
  modified_base 14: mod_base = OTHER; note = 2'-deoxy-2'-fluorocytidine-3'-phosphate
  modified_base 15: mod_base = OTHER; note = 2'-O-methyluridine-3'-phosphate
  modified_base 16: mod_base = OTHER; note = 2'-deoxy-2'-fluorouridine-3'-phosphate
  modified_base 17: mod_base = OTHER; note = 2'-O-methyluridine-3'-phosphate
  modified_base 18: mod_base = OTHER; note = 2'-O-methylguanosine-3'-phosphate
  modified_base 19: mod_base = OTHER; note = 2'-O-methyladenosine-3'-phosphate
  modified_base 20: mod_base = OTHER; note = 2'-O-methylguanosine-3'-phosphate
  modified_base 21: mod_base = OTHER; note = 2'-O-methylguanosine-3'-phosphate
  modified_base 22: mod_base = OTHER; note = 2'-O-methyladenosine-3'-phosphate
  modified_base 23: mod_base = OTHER; note = 2'-O-methyluridine
tataaacacagctctttgaggat

SEQ ID NO: 5646 - RNA, 23 nt, synthetic construct
  source 1..23: mol_type = other RNA
  modified_base 1: mod_base = OTHER; note = 2'-O-methyluridine-3'-phosphate 5'phosphate
  modified_base 2: mod_base = OTHER; note = 2'-deoxy-2'-fluoroadenosine-3'-phosphate
  modified_base 3: mod_base = OTHER; note = 2'-O-methyladenosine-3'-phosphate
  modified_base 4: mod_base = OTHER; note = 2'-O-methyluridine-3'-phosphate
  modified_base 5: mod_base = OTHER; note = 2'-O-methyladenosine-3'-phosphate
  modified_base 6: mod_base = OTHER; note = 2'-deoxy-2'-fluoroadenosine-3'-phosphate
  modified_base 7: mod_base = OTHER; note = 2'-O-methyladenosine-3'-phosphate
  modified_base 8: mod_base = OTHER; note = 2'-O-methylcytidine-3'-phosphate
  modified_base 9: mod_base = OTHER; note = 2'-O-methyladenosine-3'-phosphate
  modified_base 10: mod_base = OTHER; note = 2'-O-methylcytidine-3'-phosphate
  modified_base 11: mod_base = OTHER; note = 2'-O-methyladenosine-3'-phosphate
  modified_base 12: mod_base = OTHER; note = 2'-O-methylguanosine-3'-phosphate
  modified_base 13: mod_base = OTHER; note = 2'-O-methylcytidine-3'-phosphate
  modified_base 14: mod_base = OTHER; note = 2'-deoxy-2'-fluorouridine-3'-phosphate
  modified_base 15: mod_base = OTHER; note = 2'-O-methylcytidine-3'-phosphate
  modified_base 16: mod_base = OTHER; note = 2'-deoxy-2'-fluorouridine-3'-phosphate
  modified_base 17: mod_base = OTHER; note = 2'-O-methyluridine-3'-phosphate
  modified_base 18: mod_base = OTHER; note = 2'-O-methyluridine-3'-phosphate
  modified_base 19: mod_base = OTHER; note = 2'-O-methylguanosine-3'-phosphate
  modified_base 20: mod_base = OTHER; note = 2'-O-methyladenosine-3'-phosphate
  modified_base 21: mod_base = OTHER; note = 2'-O-methylguanosine-3'-phosphate
  modified_base 22: mod_base = OTHER; note = 2'-O-methylguanosine-3'-phosphate
  modified_base 23: mod_base = OTHER; note = 2'-O-methyladenosine
taataaacacagctctttgagga

SEQ ID NO: 5647 - RNA, 23 nt, synthetic construct
  source 1..23: mol_type = other RNA
  modified_base 1: mod_base = OTHER; note = 2'-O-methyluridine-3'-phosphate 5'phosphate
  modified_base 2: mod_base = OTHER; note = 2'-deoxy-2'-fluoroadenosine-3'-phosphate
  modified_base 3: mod_base = OTHER; note = 2'-O-methyladenosine-3'-phosphate
  modified_base 4: mod_base = OTHER; note = 2'-O-methyladenosine-3'-phosphate
  modified_base 5: mod_base = OTHER; note = 2'-O-methyluridine-3'-phosphate
  modified_base 6: mod_base = OTHER; note = 2'-deoxy-2'-fluoroadenosine-3'-phosphate
  modified_base 7: mod_base = OTHER; note = 2'-O-methyladenosine-3'-phosphate
  modified_base 8: mod_base = OTHER; note = 2'-O-methyladenosine-3'-phosphate
  modified_base 9: mod_base = OTHER; note = 2'-O-methylcytidine-3'-phosphate
  modified_base 10: mod_base = OTHER; note = 2'-O-methyladenosine-3'-phosphate
  modified_base 11: mod_base = OTHER; note = 2'-O-methylcytidine-3'-phosphate
  modified_base 12: mod_base = OTHER; note = 2'-O-methyladenosine-3'-phosphate
  modified_base 13: mod_base = OTHER; note = 2'-O-methylguanosine-3'-phosphate
  modified_base 14: mod_base = OTHER; note = 2'-deoxy-2'-fluorocytidine-3'-phosphate
  modified_base 15: mod_base = OTHER; note = 2'-O-methyluridine-3'-phosphate
  modified_base 16: mod_base = OTHER; note = 2'-deoxy-2'-fluorocytidine-3'-phosphate
  modified_base 17: mod_base = OTHER; note = 2'-O-methyluridine-3'-phosphate
  modified_base 18: mod_base = OTHER; note = 2'-O-methyluridine-3'-phosphate
  modified_base 19: mod_base = OTHER; note = 2'-O-methyluridine-3'-phosphate
  modified_base 20: mod_base = OTHER; note = 2'-O-methylguanosine-3'-phosphate
  modified_base 21: mod_base = OTHER; note = 2'-O-methyladenosine-3'-phosphate
  modified_base 22: mod_base = OTHER; note = 2'-O-methylguanosine-3'-phosphate
  modified_base 23: mod_base = OTHER; note = 2'-O-methylguanosine
taaataaacacagctctttgagg

SEQ ID NO: 5648 - RNA, 23 nt, synthetic construct
  source 1..23: mol_type = other RNA
  modified_base 1: mod_base = OTHER; note = 2'-O-methyluridine-3'-phosphate 5'phosphate
  modified_base 2: mod_base = OTHER; note = 2'-deoxy-2'-fluoroguanosine-3'-phosphate
  modified_base 3: mod_base = OTHER; note = 2'-O-methyladenosine-3'-phosphate
  modified_base 4: mod_base = OTHER; note = 2'-O-methyladenosine-3'-phosphate
  modified_base 5: mod_base = OTHER; note = 2'-O-methyladenosine-3'-phosphate
  modified_base 6: mod_base = OTHER; note = 2'-deoxy-2'-fluorouridine-3'-phosphate
  modified_base 7: mod_base = OTHER; note = 2'-O-methyladenosine-3'-phosphate
  modified_base 8: mod_base = OTHER; note = 2'-O-methyladenosine-3'-phosphate
  modified_base 9: mod_base = OTHER; note = 2'-O-methyladenosine-3'-phosphate
  modified_base 10: mod_base = OTHER; note = 2'-O-methylcytidine-3'-phosphate
  modified_base 11: mod_base = OTHER; note = 2'-O-methyladenosine-3'-phosphate
  modified_base 12: mod_base = OTHER; note = 2'-O-methylcytidine-3'-phosphate
  modified_base 13: mod_base = OTHER; note = 2'-O-methyladenosine-3'-phosphate
  modified_base 14: mod_base = OTHER; note = 2'-deoxy-2'-fluoroguanosine-3'-phosphate
  modified_base 15: mod_base = OTHER; note = 2'-O-methylcytidine-3'-phosphate
  modified_base 16: mod_base = OTHER; note = 2'-deoxy-2'-fluorouridine-3'-phosphate
  modified_base 17: mod_base = OTHER; note = 2'-O-methylcytidine-3'-phosphate
  modified_base 18: mod_base = OTHER; note = 2'-O-methyluridine-3'-phosphate
  modified_base 19: mod_base = OTHER; note = 2'-O-methyluridine-3'-phosphate
  modified_base 20: mod_base = OTHER; note = 2'-O-methyluridine-3'-phosphate
  modified_base 21: mod_base = OTHER; note = 2'-O-methylguanosine-3'-phosphate
  modified_base 22: mod_base = OTHER; note = 2'-O-methyladenosine-3'-phosphate
  modified_base 23: mod_base = OTHER; note = 2'-O-methylguanosine
tgaaataaacacagctctttgag

SEQ ID NO: 5649 - RNA, 23 nt, synthetic construct
  source 1..23: mol_type = other RNA
  modified_base 1: mod_base = OTHER; note = 2'-O-methyluridine-3'-phosphate 5'phosphate
  modified_base 2: mod_base = OTHER; note = 2'-deoxy-2'-fluorouridine-3'-phosphate
  modified_base 3: mod_base = OTHER; note = 2'-O-methylguanosine-3'-phosphate
  modified_base 4: mod_base = OTHER; note = 2'-O-methyladenosine-3'-phosphate
  modified_base 5: mod_base = OTHER; note = 2'-O-methyladenosine-3'-phosphate
  modified_base 6: mod_base = OTHER; note = 2'-deoxy-2'-fluoroadenosine-3'-phosphate
  modified_base 7: mod_base = OTHER; note = 2'-O-methyluridine-3'-phosphate
  modified_base 8: mod_base = OTHER; note = 2'-O-methyladenosine-3'-phosphate
  modified_base 9: mod_base = OTHER; note = 2'-O-methyladenosine-3'-phosphate
  modified_base 10: mod_base = OTHER; note = 2'-O-methyladenosine-3'-phosphate
  modified_base 11: mod_base = OTHER; note = 2'-O-methylcytidine-3'-phosphate
  modified_base 12: mod_base = OTHER; note = 2'-O-methyladenosine-3'-phosphate
  modified_base 13: mod_base = OTHER; note = 2'-O-methylcytidine-3'-phosphate
  modified_base 14: mod_base = OTHER; note = 2'-deoxy-2'-fluoroadenosine-3'-phosphate
  modified_base 15: mod_base = OTHER; note = 2'-O-methylguanosine-3'-phosphate
  modified_base 16: mod_base = OTHER; note = 2'-deoxy-2'-fluorocytidine-3'-phosphate
  modified_base 17: mod_base = OTHER; note = 2'-O-methyluridine-3'-phosphate
  modified_base 18: mod_base = OTHER; note = 2'-O-methylcytidine-3'-phosphate
  modified_base 19: mod_base = OTHER; note = 2'-O-methyluridine-3'-phosphate
  modified_base 20: mod_base = OTHER; note = 2'-O-methyluridine-3'-phosphate
  modified_base 21: mod_base = OTHER; note = 2'-O-methyluridine-3'-phosphate
  modified_base 22: mod_base = OTHER; note = 2'-O-methylguanosine-3'-phosphate
  modified_base 23: mod_base = OTHER; note = 2'-O-methyladenosine
ttgaaataaacacagctctttga

SEQ ID NO: 5650 - RNA, 23 nt, synthetic construct
  source 1..23: mol_type = other RNA
  modified_base 1: mod_base = OTHER; note = 2'-O-methyluridine-3'-phosphate 5'phosphate
  modified_base 2: mod_base = OTHER; note = 2'-deoxy-2'-fluorouridine-3'-phosphate
  modified_base 3: mod_base = OTHER; note = 2'-O-methylcytidine-3'-phosphate
  modified_base 4: mod_base = OTHER; note = 2'-O-methyladenosine-3'-phosphate
  modified_base 5: mod_base = OTHER; note = 2'-O-methyladenosine-3'-phosphate
  modified_base 6: mod_base = OTHER; note = 2'-deoxy-2'-fluorouridine-3'-phosphate
  modified_base 7: mod_base = OTHER; note = 2'-O-methylguanosine-3'-phosphate
  modified_base 8: mod_base = OTHER; note = 2'-O-methyladenosine-3'-phosphate
  modified_base 9: mod_base = OTHER; note = 2'-O-methyladenosine-3'-phosphate
  modified_base 10: mod_base = OTHER; note = 2'-O-methyladenosine-3'-phosphate
  modified_base 11: mod_base = OTHER; note = 2'-O-methyluridine-3'-phosphate
  modified_base 12: mod_base = OTHER; note = 2'-O-methyladenosine-3'-phosphate
  modified_base 13: mod_base = OTHER; note = 2'-O-methyladenosine-3'-phosphate
  modified_base 14: mod_base = OTHER; note = 2'-deoxy-2'-fluoroadenosine-3'-phosphate
  modified_base 15: mod_base = OTHER; note = 2'-O-methylcytidine-3'-phosphate
  modified_base 16: mod_base = OTHER; note = 2'-deoxy-2'-fluoroadenosine-3'-phosphate
  modified_base 17: mod_base = OTHER; note = 2'-O-methylcytidine-3'-phosphate
  modified_base 18: mod_base = OTHER; note = 2'-O-methyladenosine-3'-phosphate
  modified_base 19: mod_base = OTHER; note = 2'-O-methylguanosine-3'-phosphate
  modified_base 20: mod_base = OTHER; note = 2'-O-methylcytidine-3'-phosphate
  modified_base 21: mod_base = OTHER; note = 2'-O-methyluridine-3'-phosphate
  modified_base 22: mod_base = OTHER; note = 2'-O-methylcytidine-3'-phosphate
  modified_base 23: mod_base = OTHER; note = 2'-O-methyluridine
ttcaatgaaataaacacagctct

SEQ ID NO: 5651 - RNA, 23 nt, synthetic construct
  source 1..23: mol_type = other RNA
  modified_base 1: mod_base = OTHER; note = 2'-O-methyluridine-3'-phosphate 5'phosphate
  modified_base 2: mod_base = OTHER; note = 2'-deoxy-2'-fluoroguanosine-3'-phosphate
  modified_base 3: mod_base = OTHER; note = 2'-O-methyluridine-3'-phosphate
  modified_base 4: mod_base = OTHER; note = 2'-O-methylcytidine-3'-phosphate
  modified_base 5: mod_base = OTHER; note = 2'-O-methyladenosine-3'-phosphate
  modified_base 6: mod_base = OTHER; note = 2'-deoxy-2'-fluoroadenosine-3'-phosphate
  modified_base 7: mod_base = OTHER; note = 2'-O-methyluridine-3'-phosphate
  modified_base 8: mod_base = OTHER; note = 2'-O-methylguanosine-3'-phosphate
  modified_base 9: mod_base = OTHER; note = 2'-O-methyladenosine-3'-phosphate
  modified_base 10: mod_base = OTHER; note = 2'-O-methyladenosine-3'-phosphate
  modified_base 11: mod_base = OTHER; note = 2'-O-methyladenosine-3'-phosphate
  modified_base 12: mod_base = OTHER; note = 2'-O-methyluridine-3'-phosphate
  modified_base 13: mod_base = OTHER; note = 2'-O-methyladenosine-3'-phosphate
  modified_base 14: mod_base = OTHER; note = 2'-deoxy-2'-fluoroadenosine-3'-phosphate
  modified_base 15: mod_base = OTHER; note = 2'-O-methyladenosine-3'-phosphate
  modified_base 16: mod_base = OTHER; note = 2'-deoxy-2'-fluorocytidine-3'-phosphate
  modified_base 17: mod_base = OTHER; note = 2'-O-methyladenosine-3'-phosphate
  modified_base 18: mod_base = OTHER; note = 2'-O-methylcytidine-3'-phosphate
  modified_base 19: mod_base = OTHER; note = 2'-O-methyladenosine-3'-phosphate
  modified_base 20: mod_base = OTHER; note = 2'-O-methylguanosine-3'-phosphate
  modified_base 21: mod_base = OTHER; note = 2'-O-methylcytidine-3'-phosphate
  modified_base 22: mod_base = OTHER; note = 2'-O-methyluridine-3'-phosphate
  modified_base 23: mod_base = OTHER; note = 2'-O-methylcytidine
tgtcaatgaaataaacacagctc

SEQ ID NO: 5652 - RNA, 23 nt, synthetic construct
  source 1..23: mol_type = other RNA
  modified_base 1: mod_base = OTHER; note = 2'-O-methyluridine-3'-phosphate 5'phosphate
  modified_base 2: mod_base = OTHER; note = 2'-deoxy-2'-fluorouridine-3'-phosphate
  modified_base 3: mod_base = OTHER; note = 2'-O-methyluridine-3'-phosphate
  modified_base 4: mod_base = OTHER; note = 2'-O-methyluridine-3'-phosphate
  modified_base 5: mod_base = OTHER; note = 2'-O-methylguanosine-3'-phosphate
  modified_base 6: mod_base = OTHER; note = 2'-deoxy-2'-fluorouridine-3'-phosphate
  modified_base 7: mod_base = OTHER; note = 2'-O-methylcytidine-3'-phosphate
  modified_base 8: mod_base = OTHER; note = 2'-O-methyladenosine-3'-phosphate
  modified_base 9: mod_base = OTHER; note = 2'-O-methyladenosine-3'-phosphate
  modified_base 10: mod_base = OTHER; note = 2'-O-methyluridine-3'-phosphate
  modified_base 11: mod_base = OTHER; note = 2'-O-methylguanosine-3'-phosphate
  modified_base 12: mod_base = OTHER; note = 2'-O-methyladenosine-3'-phosphate
  modified_base 13: mod_base = OTHER; note = 2'-O-methyladenosine-3'-phosphate
  modified_base 14: mod_base = OTHER; note = 2'-deoxy-2'-fluoroadenosine-3'-phosphate
  modified_base 15: mod_base = OTHER; note = 2'-O-methyluridine-3'-phosphate
  modified_base 16: mod_base = OTHER; note = 2'-deoxy-2'-fluoroadenosine-3'-phosphate
  modified_base 17: mod_base = OTHER; note = 2'-O-methyladenosine-3'-phosphate
  modified_base 18: mod_base = OTHER; note = 2'-O-methyladenosine-3'-phosphate
  modified_base 19: mod_base = OTHER; note = 2'-O-methylcytidine-3'-phosphate
  modified_base 20: mod_base = OTHER; note = 2'-O-methyladenosine-3'-phosphate
  modified_base 21: mod_base = OTHER; note = 2'-O-methylcytidine-3'-phosphate
  modified_base 22: mod_base = OTHER; note = 2'-O-methyladenosine-3'-phosphate
  modified_base 23: mod_base = OTHER; note = 2'-O-methylguanosine
ttttgtcaatgaaataaacacag

SEQ ID NO: 5653 - RNA, 23 nt, synthetic construct
  source 1..23: mol_type = other RNA
  modified_base 1: mod_base = OTHER; note = 2'-O-methyluridine-3'-phosphate 5'phosphate
  modified_base 2: mod_base = OTHER; note = 2'-deoxy-2'-fluoroadenosine-3'-phosphate
  modified_base 3: mod_base = OTHER; note = 2'-O-methyladenosine-3'-phosphate
  modified_base 4: mod_base = OTHER; note = 2'-O-methyluridine-3'-phosphate
  modified_base 5: mod_base = OTHER; note = 2'-O-methylcytidine-3'-phosphate
  modified_base 6: mod_base = OTHER; note = 2'-deoxy-2'-fluorouridine-3'-phosphate
  modified_base 7: mod_base = OTHER; note = 2'-O-methyladenosine-3'-phosphate
  modified_base 8: mod_base = OTHER; note = 2'-O-methyluridine-3'-phosphate
  modified_base 9: mod_base = OTHER; note = 2'-O-methyluridine-3'-phosphate
  modified_base 10: mod_base = OTHER; note = 2'-O-methyluridine-3'-phosphate
  modified_base 11: mod_base = OTHER; note = 2'-O-methylguanosine-3'-phosphate
  modified_base 12: mod_base = OTHER; note = 2'-O-methyluridine-3'-phosphate
  modified_base 13: mod_base = OTHER; note = 2'-O-methylcytidine-3'-phosphate
  modified_base 14: mod_base = OTHER; note = 2'-deoxy-2'-fluoroadenosine-3'-phosphate
  modified_base 15: mod_base = OTHER; note = 2'-O-methyladenosine-3'-phosphate
  modified_base 16: mod_base = OTHER; note = 2'-deoxy-2'-fluorouridine-3'-phosphate
  modified_base 17: mod_base = OTHER; note = 2'-O-methylguanosine-3'-phosphate
  modified_base 18: mod_base = OTHER; note = 2'-O-methyladenosine-3'-phosphate
  modified_base 19: mod_base = OTHER; note = 2'-O-methyladenosine-3'-phosphate
  modified_base 20: mod_base = OTHER; note = 2'-O-methyladenosine-3'-phosphate
  modified_base 21: mod_base = OTHER; note = 2'-O-methyluridine-3'-phosphate
  modified_base 22: mod_base = OTHER; note = 2'-O-methyladenosine-3'-phosphate
  modified_base 23: mod_base = OTHER; note = 2'-O-methyladenosine
taatctatttgtcaatgaaataa

SEQ ID NO: 5654 - RNA, 23 nt, synthetic construct
  source 1..23: mol_type = other RNA
  modified_base 1: mod_base = OTHER; note = 2'-O-methyluridine-3'-phosphate 5'phosphate
  modified_base 2: mod_base = OTHER; note = 2'-deoxy-2'-fluorouridine-3'-phosphate
  modified_base 3: mod_base = OTHER; note = 2'-O-methyladenosine-3'-phosphate
  modified_base 4: mod_base = OTHER; note = 2'-O-methyladenosine-3'-phosphate
  modified_base 5: mod_base = OTHER; note = 2'-O-methyluridine-3'-phosphate
  modified_base 6: mod_base = OTHER; note = 2'-deoxy-2'-fluorocytidine-3'-phosphate
  modified_base 7: mod_base = OTHER; note = 2'-O-methyluridine-3'-phosphate
  modified_base 8: mod_base = OTHER; note = 2'-O-methyladenosine-3'-phosphate
  modified_base 9: mod_base = OTHER; note = 2'-O-methyluridine-3'-phosphate
  modified_base 10: mod_base = OTHER; note = 2'-O-methyluridine-3'-phosphate
  modified_base 11: mod_base = OTHER; note = 2'-O-methyluridine-3'-phosphate
  modified_base 12: mod_base = OTHER; note = 2'-O-methylguanosine-3'-phosphate
  modified_base 13: mod_base = OTHER; note = 2'-O-methyluridine-3'-phosphate
  modified_base 14: mod_base = OTHER; note = 2'-deoxy-2'-fluorocytidine-3'-phosphate
  modified_base 15: mod_base = OTHER; note = 2'-O-methyladenosine-3'-phosphate
  modified_base 16: mod_base = OTHER; note = 2'-deoxy-2'-fluoroadenosine-3'-phosphate
  modified_base 17: mod_base = OTHER; note = 2'-O-methyluridine-3'-phosphate
  modified_base 18: mod_base = OTHER; note = 2'-O-methylguanosine-3'-phosphate
  modified_base 19: mod_base = OTHER; note = 2'-O-methyladenosine-3'-phosphate
  modified_base 20: mod_base = OTHER; note = 2'-O-methyladenosine-3'-phosphate
  modified_base 21: mod_base = OTHER; note = 2'-O-methyladenosine-3'-phosphate
  modified_base 22: mod_base = OTHER; note = 2'-O-methyluridine-3'-phosphate
  modified_base 23: mod_base = OTHER; note = 2'-O-methyladenosine
ttaatctatttgtcaatgaaata

SEQ ID NO: 5655 - RNA, 23 nt, synthetic construct
  source 1..23: mol_type = other RNA
  modified_base 1: mod_base = OTHER; note = 2'-O-methyluridine-3'-phosphate 5'phosphate
  modified_base 2: mod_base = OTHER; note = 2'-deoxy-2'-fluoroadenosine-3'-phosphate
  modified_base 3: mod_base = OTHER; note = 2'-O-methyluridine-3'-phosphate
  modified_base 4: mod_base = OTHER; note = 2'-O-methyladenosine-3'-phosphate
  modified_base 5: mod_base = OTHER; note = 2'-O-methyladenosine-3'-phosphate
  modified_base 6: mod_base = OTHER; note = 2'-deoxy-2'-fluorouridine-3'-phosphate
  modified_base 7: mod_base = OTHER; note = 2'-O-methylcytidine-3'-phosphate
  modified_base 8: mod_base = OTHER; note = 2'-O-methyluridine-3'-phosphate
  modified_base 9: mod_base = OTHER; note = 2'-O-methyladenosine-3'-phosphate
  modified_base 10: mod_base = OTHER; note = 2'-O-methyluridine-3'-phosphate
  modified_base 11: mod_base = OTHER; note = 2'-O-methyluridine-3'-phosphate
  modified_base 12: mod_base = OTHER; note = 2'-O-methyluridine-3'-phosphate
  modified_base 13: mod_base = OTHER; note = 2'-O-methylguanosine-3'-phosphate
  modified_base 14: mod_base = OTHER; note = 2'-deoxy-2'-fluorouridine-3'-phosphate
  modified_base 15: mod_base = OTHER; note = 2'-O-methylcytidine-3'-phosphate
  modified_base 16: mod_base = OTHER; note = 2'-deoxy-2'-fluoroadenosine-3'-phosphate
  modified_base 17: mod_base = OTHER; note = 2'-O-methyladenosine-3'-phosphate
  modified_base 18: mod_base = OTHER; note = 2'-O-methyluridine-3'-phosphate
  modified_base 19: mod_base = OTHER; note = 2'-O-methylguanosine-3'-phosphate
  modified_base 20: mod_base = OTHER; note = 2'-O-methyladenosine-3'-phosphate
  modified_base 21: mod_base = OTHER; note = 2'-O-methyladenosine-3'-phosphate
  modified_base 22: mod_base = OTHER; note = 2'-O-methyladenosine-3'-phosphate
  modified_base 23: mod_base = OTHER; note = 2'-O-methyluridine
tataatctatttgtcaatgaaat

SEQ ID NO: 5656 - RNA, 23 nt, synthetic construct
  source 1..23: mol_type = other RNA
  modified_base 1: mod_base = OTHER; note = 2'-O-methyluridine-3'-phosphate 5'phosphate
  modified_base 2: mod_base = OTHER; note = 2'-deoxy-2'-fluoroadenosine-3'-phosphate
  modified_base 3: mod_base = OTHER; note = 2'-O-methyladenosine-3'-phosphate
  modified_base 4: mod_base = OTHER; note = 2'-O-methyluridine-3'-phosphate
  modified_base 5: mod_base = OTHER; note = 2'-O-methyladenosine-3'-phosphate
  modified_base 6: mod_base = OTHER; note = 2'-deoxy-2'-fluoroadenosine-3'-phosphate
  modified_base 7: mod_base = OTHER; note = 2'-O-methyluridine-3'-phosphate
  modified_base 8: mod_base = OTHER; note = 2'-O-methylcytidine-3'-phosphate
  modified_base 9: mod_base = OTHER; note = 2'-O-methyluridine-3'-phosphate
  modified_base 10: mod_base = OTHER; note = 2'-O-methyladenosine-3'-phosphate
  modified_base 11: mod_base = OTHER; note = 2'-O-methyluridine-3'-phosphate
  modified_base 12: mod_base = OTHER; note = 2'-O-methyluridine-3'-phosphate
  modified_base 13: mod_base = OTHER; note = 2'-O-methyluridine-3'-phosphate
  modified_base 14: mod_base = OTHER; note = 2'-deoxy-2'-fluoroguanosine-3'-phosphate
  modified_base 15: mod_base = OTHER; note = 2'-O-methyluridine-3'-phosphate
  modified_base 16: mod_base = OTHER; note = 2'-deoxy-2'-fluorocytidine-3'-phosphate
  modified_base 17: mod_base = OTHER; note = 2'-O-methyladenosine-3'-phosphate
  modified_base 18: mod_base = OTHER; note = 2'-O-methyladenosine-3'-phosphate
  modified_base 19: mod_base = OTHER; note = 2'-O-methyluridine-3'-phosphate
  modified_base 20: mod_base = OTHER; note = 2'-O-methylguanosine-3'-phosphate
  modified_base 21: mod_base = OTHER; note = 2'-O-methyladenosine-3'-phosphate
  modified_base 22: mod_base = OTHER; note = 2'-O-methyladenosine-3'-phosphate
  modified_base 23: mod_base = OTHER; note = 2'-O-methyladenosine
taataatctatttgtcaatgaaa

SEQ ID NO: 5657 - RNA, 23 nt, synthetic construct
  source 1..23: mol_type = other RNA
  modified_base 1: mod_base = OTHER; note = 2'-O-methyluridine-3'-phosphate 5'phosphate
  modified_base 2: mod_base = OTHER; note = 2'-deoxy-2'-fluoroadenosine-3'-phosphate
  modified_base 3: mod_base = OTHER; note = 2'-O-methyladenosine-3'-phosphate
  modified_base 4: mod_base = OTHER; note = 2'-O-methyladenosine-3'-phosphate
  modified_base 5: mod_base = OTHER; note = 2'-O-methyluridine-3'-phosphate
  modified_base 6: mod_base = OTHER; note = 2'-deoxy-2'-fluoroadenosine-3'-phosphate
  modified_base 7: mod_base = OTHER; note = 2'-O-methyladenosine-3'-phosphate
  modified_base 8: mod_base = OTHER; note = 2'-O-methyluridine-3'-phosphate
  modified_base 9: mod_base = OTHER; note = 2'-O-methylcytidine-3'-phosphate
  modified_base 10: mod_base = OTHER; note = 2'-O-methyluridine-3'-phosphate
  modified_base 11: mod_base = OTHER; note = 2'-O-methyladenosine-3'-phosphate
  modified_base 12: mod_base = OTHER; note = 2'-O-methyluridine-3'-phosphate
  modified_base 13: mod_base = OTHER; note = 2'-O-methyluridine-3'-phosphate
  modified_base 14: mod_base = OTHER; note = 2'-deoxy-2'-fluorouridine-3'-phosphate
  modified_base 15: mod_base = OTHER; note = 2'-O-methylguanosine-3'-phosphate
  modified_base 16: mod_base = OTHER; note = 2'-deoxy-2'-fluorouridine-3'-phosphate
  modified_base 17: mod_base = OTHER; note = 2'-O-methylcytidine-3'-phosphate
  modified_base 18: mod_base = OTHER; note = 2'-O-methyladenosine-3'-phosphate
  modified_base 19: mod_base = OTHER; note = 2'-O-methyladenosine-3'-phosphate
  modified_base 20: mod_base = OTHER; note = 2'-O-methyluridine-3'-phosphate
  modified_base 21: mod_base = OTHER; note = 2'-O-methylguanosine-3'-phosphate
  modified_base 22: mod_base = OTHER; note = 2'-O-methyladenosine-3'-phosphate
  modified_base 23: mod_base = OTHER; note = 2'-O-methyladenosine
taaataatctatttgtcaatgaa

SEQ ID NO: 5658 - RNA, 23 nt, synthetic construct
  source 1..23: mol_type = other RNA
  modified_base 1: mod_base = OTHER; note = 2'-O-methyluridine-3'-phosphate 5'phosphate
  modified_base 2: mod_base = OTHER; note = 2'-deoxy-2'-fluorocytidine-3'-phosphate
  modified_base 3: mod_base = OTHER; note = 2'-O-methyladenosine-3'-phosphate
  modified_base 4: mod_base = OTHER; note = 2'-O-methyladenosine-3'-phosphate
  modified_base 5: mod_base = OTHER; note = 2'-O-methyladenosine-3'-phosphate
  modified_base 6: mod_base = OTHER; note = 2'-deoxy-2'-fluorouridine-3'-phosphate
  modified_base 7: mod_base = OTHER; note = 2'-O-methyladenosine-3'-phosphate
  modified_base 8: mod_base = OTHER; note = 2'-O-methyladenosine-3'-phosphate
  modified_base 9: mod_base = OTHER; note = 2'-O-methyluridine-3'-phosphate
  modified_base 10: mod_base = OTHER; note = 2'-O-methylcytidine-3'-phosphate
  modified_base 11: mod_base = OTHER; note = 2'-O-methyluridine-3'-phosphate
  modified_base 12: mod_base = OTHER; note = 2'-O-methyladenosine-3'-phosphate
  modified_base 13: mod_base = OTHER; note = 2'-O-methyluridine-3'-phosphate
  modified_base 14: mod_base = OTHER; note = 2'-deoxy-2'-fluorouridine-3'-phosphate
  modified_base 15: mod_base = OTHER; note = 2'-O-methyluridine-3'-phosphate
  modified_base 16: mod_base = OTHER; note = 2'-deoxy-2'-fluoroguanosine-3'-phosphate
  modified_base 17: mod_base = OTHER; note = 2'-O-methyluridine-3'-phosphate
  modified_base 18: mod_base = OTHER; note = 2'-O-methylcytidine-3'-phosphate
  modified_base 19: mod_base = OTHER; note = 2'-O-methyladenosine-3'-phosphate
  modified_base 20: mod_base = OTHER; note = 2'-O-methyladenosine-3'-phosphate
  modified_base 21: mod_base = OTHER; note = 2'-O-methyluridine-3'-phosphate
  modified_base 22: mod_base = OTHER; note = 2'-O-methylguanosine-3'-phosphate
  modified_base 23: mod_base = OTHER; note = 2'-O-methyladenosine
tcaaataatctatttgtcaatga

SEQ ID NO: 5659 - RNA, 23 nt, synthetic construct
  source 1..23: mol_type = other RNA
  modified_base 1: mod_base = OTHER; note = 2'-O-methyluridine-3'-phosphate 5'phosphate
  modified_base 2: mod_base = OTHER; note = 2'-deoxy-2'-fluoroadenosine-3'-phosphate
  modified_base 3: mod_base = OTHER; note = 2'-O-methylcytidine-3'-phosphate
  modified_base 4: mod_base = OTHER; note = 2'-O-methyladenosine-3'-phosphate
  modified_base 5: mod_base = OTHER; note = 2'-O-methyladenosine-3'-phosphate
  modified_base 6: mod_base = OTHER; note = 2'-deoxy-2'-fluoroadenosine-3'-phosphate
  modified_base 7: mod_base = OTHER; note = 2'-O-methyluridine-3'-phosphate
  modified_base 8: mod_base = OTHER; note = 2'-O-methyladenosine-3'-phosphate
  modified_base 9: mod_base = OTHER; note = 2'-O-methyladenosine-3'-phosphate
  modified_base 10: mod_base = OTHER; note = 2'-O-methyluridine-3'-phosphate
  modified_base 11: mod_base = OTHER; note = 2'-O-methylcytidine-3'-phosphate
  modified_base 12: mod_base = OTHER; note = 2'-O-methyluridine-3'-phosphate
  modified_base 13: mod_base = OTHER; note = 2'-O-methyladenosine-3'-phosphate
  modified_base 14: mod_base = OTHER; note = 2'-deoxy-2'-fluorouridine-3'-phosphate
  modified_base 15: mod_base = OTHER; note = 2'-O-methyluridine-3'-phosphate
  modified_base 16: mod_base = OTHER; note = 2'-deoxy-2'-fluorouridine-3'-phosphate
  modified_base 17: mod_base = OTHER; note = 2'-O-methylguanosine-3'-phosphate
  modified_base 18: mod_base = OTHER; note = 2'-O-methyluridine-3'-phosphate
  modified_base 19: mod_base = OTHER; note = 2'-O-methylcytidine-3'-phosphate
  modified_base 20: mod_base = OTHER; note = 2'-O-methyladenosine-3'-phosphate
  modified_base 21: mod_base = OTHER; note = 2'-O-methyladenosine-3'-phosphate
  modified_base 22: mod_base = OTHER; note = 2'-O-methyluridine-3'-phosphate
  modified_base 23: mod_base = OTHER; note = 2'-O-methylguanosine
tacaaataatctatttgtcaatg

SEQ ID NO: 5660 - RNA, 23 nt, synthetic construct
  source 1..23: mol_type = other RNA
  modified_base 1: mod_base = OTHER; note = 2'-O-methyluridine-3'-phosphate 5'phosphate
  modified_base 2: mod_base = OTHER; note = 2'-deoxy-2'-fluorouridine-3'-phosphate
  modified_base 3: mod_base = OTHER; note = 2'-O-methyladenosine-3'-phosphate
  modified_base 4: mod_base = OTHER; note = 2'-O-methylcytidine-3'-phosphate
  modified_base 5: mod_base = OTHER; note = 2'-O-methyladenosine-3'-phosphate
  modified_base 6: mod_base = OTHER; note = 2'-deoxy-2'-fluoroadenosine-3'-phosphate
  modified_base 7: mod_base = OTHER; note = 2'-O-methyladenosine-3'-phosphate
  modified_base 8: mod_base = OTHER; note = 2'-O-methyluridine-3'-phosphate
  modified_base 9: mod_base = OTHER; note = 2'-O-methyladenosine-3'-phosphate
  modified_base 10: mod_base = OTHER; note = 2'-O-methyladenosine-3'-phosphate
  modified_base 11: mod_base = OTHER; note = 2'-O-methyluridine-3'-phosphate
  modified_base 12: mod_base = OTHER; note = 2'-O-methylcytidine-3'-phosphate
  modified_base 13: mod_base = OTHER; note = 2'-O-methyluridine-3'-phosphate
  modified_base 14: mod_base = OTHER; note = 2'-deoxy-2'-fluoroadenosine-3'-phosphate
  modified_base 15: mod_base = OTHER; note = 2'-O-methyluridine-3'-phosphate
  modified_base 16: mod_base = OTHER; note = 2'-deoxy-2'-fluorouridine-3'-phosphate
  modified_base 17: mod_base = OTHER; note = 2'-O-methyluridine-3'-phosphate
  modified_base 18: mod_base = OTHER; note = 2'-O-methylguanosine-3'-phosphate
  modified_base 19: mod_base = OTHER; note = 2'-O-methyluridine-3'-phosphate
  modified_base 20: mod_base = OTHER; note = 2'-O-methylcytidine-3'-phosphate
  modified_base 21: mod_base = OTHER; note = 2'-O-methyladenosine-3'-phosphate
  modified_base 22: mod_base = OTHER; note = 2'-O-methyladenosine-3'-phosphate
  modified_base 23: mod_base = OTHER; note = 2'-O-methyluridine
ttacaaataatctatttgtcaat

SEQ ID NO: 5661 - RNA, 23 nt, synthetic construct
  source 1..23: mol_type = other RNA
  modified_base 1: mod_base = OTHER; note = 2'-O-methyluridine-3'-phosphate 5'phosphate
  modified_base 2: mod_base = OTHER; note = 2'-deoxy-2'-fluoroadenosine-3'-phosphate
  modified_base 3: mod_base = OTHER; note = 2'-O-methyluridine-3'-phosphate
  modified_base 4: mod_base = OTHER; note = 2'-O-methyladenosine-3'-phosphate
  modified_base 5: mod_base = OTHER; note = 2'-O-methylcytidine-3'-phosphate
  modified_base 6: mod_base = OTHER; note = 2'-deoxy-2'-fluoroadenosine-3'-phosphate
  modified_base 7: mod_base = OTHER; note = 2'-O-methyladenosine-3'-phosphate
  modified_base 8: mod_base = OTHER; note = 2'-O-methyladenosine-3'-phosphate
  modified_base 9: mod_base = OTHER; note = 2'-O-methyluridine-3'-phosphate
  modified_base 10: mod_base = OTHER; note = 2'-O-methyladenosine-3'-phosphate
  modified_base 11: mod_base = OTHER; note = 2'-O-methyladenosine-3'-phosphate
  modified_base 12: mod_base = OTHER; note = 2'-O-methyluridine-3'-phosphate
  modified_base 13: mod_base = OTHER; note = 2'-O-methylcytidine-3'-phosphate
  modified_base 14: mod_base = OTHER; note = 2'-deoxy-2'-fluorouridine-3'-phosphate
  modified_base 15: mod_base = OTHER; note = 2'-O-methyladenosine-3'-phosphate
  modified_base 16: mod_base = OTHER; note = 2'-deoxy-2'-fluorouridine-3'-phosphate
  modified_base 17: mod_base = OTHER; note = 2'-O-methyluridine-3'-phosphate
  modified_base 18: mod_base = OTHER; note = 2'-O-methyluridine-3'-phosphate
  modified_base 19: mod_base = OTHER; note = 2'-O-methylguanosine-3'-phosphate
  modified_base 20: mod_base = OTHER; note = 2'-O-methyluridine-3'-phosphate
  modified_base 21: mod_base = OTHER; note = 2'-O-methylcytidine-3'-phosphate
  modified_base 22: mod_base = OTHER; note = 2'-O-methyladenosine-3'-phosphate
  modified_base 23: mod_base = OTHER; note = 2'-O-methyladenosine
tatacaaataatctatttgtcaa

SEQ ID NO: 5662 - RNA, 23 nt, synthetic construct
  source 1..23: mol_type = other RNA
  modified_base 1: mod_base = OTHER; note = 2'-O-methyluridine-3'-phosphate 5'phosphate
  modified_base 2: mod_base = OTHER; note = 2'-deoxy-2'-fluoroadenosine-3'-phosphate
  modified_base 3: mod_base = OTHER; note = 2'-O-methyladenosine-3'-phosphate
  modified_base 4: mod_base = OTHER; note = 2'-O-methyluridine-3'-phosphate
  modified_base 5: mod_base = OTHER; note = 2'-O-methyladenosine-3'-phosphate
  modified_base 6: mod_base = OTHER; note = 2'-deoxy-2'-fluorocytidine-3'-phosphate
  modified_base 7: mod_base = OTHER; note = 2'-O-methyladenosine-3'-phosphate
  modified_base 8: mod_base = OTHER; note = 2'-O-methyladenosine-3'-phosphate
  modified_base 9: mod_base = OTHER; note = 2'-O-methyladenosine-3'-phosphate
  modified_base 10: mod_base = OTHER; note = 2'-O-methyluridine-3'-phosphate
  modified_base 11: mod_base = OTHER; note = 2'-O-methyladenosine-3'-phosphate
  modified_base 12: mod_base = OTHER; note = 2'-O-methyladenosine-3'-phosphate
  modified_base 13: mod_base = OTHER; note = 2'-O-methyluridine-3'-phosphate
  modified_base 14: mod_base = OTHER; note = 2'-deoxy-2'-fluorocytidine-3'-phosphate
  modified_base 15: mod_base = OTHER; note = 2'-O-methyluridine-3'-phosphate
  modified_base 16: mod_base = OTHER; note = 2'-deoxy-2'-fluoroadenosine-3'-phosphate
  modified_base 17: mod_base = OTHER; note = 2'-O-methyluridine-3'-phosphate
  modified_base 18: mod_base = OTHER; note = 2'-O-methyluridine-3'-phosphate
  modified_base 19: mod_base = OTHER; note = 2'-O-methyluridine-3'-phosphate
  modified_base 20: mod_base = OTHER; note = 2'-O-methylguanosine-3'-phosphate
  modified_base 21: mod_base = OTHER; note = 2'-O-methyluridine-3'-phosphate
  modified_base 22: mod_base = OTHER; note = 2'-O-methylcytidine-3'-phosphate
  modified_base 23: mod_base = OTHER; note = 2'-O-methyladenosine
taatacaaataatctatttgtca

SEQ ID NO: 5663 - RNA, 23 nt, synthetic construct
  source 1..23: mol_type = other RNA
  modified_base 1: mod_base = OTHER; note = 2'-O-methyluridine-3'-phosphate 5'phosphate
  modified_base 2: mod_base = OTHER; note = 2'-deoxy-2'-fluoroguanosine-3'-phosphate
  modified_base 3: mod_base = OTHER; note = 2'-O-methyladenosine-3'-phosphate
  modified_base 4: mod_base = OTHER; note = 2'-O-methyladenosine-3'-phosphate
  modified_base 5: mod_base = OTHER; note = 2'-O-methyluridine-3'-phosphate
  modified_base 6: mod_base = OTHER; note = 2'-deoxy-2'-fluoroadenosine-3'-phosphate
  modified_base 7: mod_base = OTHER; note = 2'-O-methylcytidine-3'-phosphate
  modified_base 8: mod_base = OTHER; note = 2'-O-methyladenosine-3'-phosphate
  modified_base 9: mod_base = OTHER; note = 2'-O-methyladenosine-3'-phosphate
  modified_base 10: mod_base = OTHER; note = 2'-O-methyladenosine-3'-phosphate
  modified_base 11: mod_base = OTHER; note = 2'-O-methyluridine-3'-phosphate
  modified_base 12: mod_base = OTHER; note = 2'-O-methyladenosine-3'-phosphate
  modified_base 13: mod_base = OTHER; note = 2'-O-methyladenosine-3'-phosphate
  modified_base 14: mod_base = OTHER; note = 2'-deoxy-2'-fluorouridine-3'-phosphate
  modified_base 15: mod_base = OTHER; note = 2'-O-methylcytidine-3'-phosphate
  modified_base 16: mod_base = OTHER; note = 2'-deoxy-2'-fluorouridine-3'-phosphate
  modified_base 17: mod_base = OTHER; note = 2'-O-methyladenosine-3'-phosphate
  modified_base 18: mod_base = OTHER; note = 2'-O-methyluridine-3'-phosphate
  modified_base 19: mod_base = OTHER; note = 2'-O-methyluridine-3'-phosphate
  modified_base 20: mod_base = OTHER; note = 2'-O-methyluridine-3'-phosphate
  modified_base 21: mod_base = OTHER; note = 2'-O-methylguanosine-3'-phosphate
  modified_base 22: mod_base = OTHER; note = 2'-O-methyluridine-3'-phosphate
  modified_base 23: mod_base = OTHER; note = 2'-O-methylcytidine
tgaatacaaataatctatttgtc

SEQ ID NO: 5664 - RNA, 23 nt, synthetic construct
  source 1..23: mol_type = other RNA
  modified_base 1: mod_base = OTHER; note = 2'-O-methyluridine-3'-phosphate 5'phosphate
  modified_base 2: mod_base = OTHER; note = 2'-deoxy-2'-fluorouridine-3'-phosphate
  modified_base 3: mod_base = OTHER; note = 2'-O-methylguanosine-3'-phosphate
  modified_base 4: mod_base = OTHER; note = 2'-O-methyladenosine-3'-phosphate
  modified_base 5: mod_base = OTHER; note = 2'-O-methyladenosine-3'-phosphate
  modified_base 6: mod_base = OTHER; note = 2'-deoxy-2'-fluorouridine-3'-phosphate
  modified_base 7: mod_base = OTHER; note = 2'-O-methyladenosine-3'-phosphate
  modified_base 8: mod_base = OTHER; note = 2'-O-methylcytidine-3'-phosphate
  modified_base 9: mod_base = OTHER; note = 2'-O-methyladenosine-3'-phosphate
  modified_base 10: mod_base = OTHER; note = 2'-O-methyladenosine-3'-phosphate
  modified_base 11: mod_base = OTHER; note = 2'-O-methyladenosine-3'-phosphate
  modified_base 12: mod_base = OTHER; note = 2'-O-methyluridine-3'-phosphate
  modified_base 13: mod_base = OTHER; note = 2'-O-methyladenosine-3'-phosphate
  modified_base 14: mod_base = OTHER; note = 2'-deoxy-2'-fluoroadenosine-3'-phosphate
  modified_base 15: mod_base = OTHER; note = 2'-O-methyluridine-3'-phosphate
  modified_base 16: mod_base = OTHER; note = 2'-deoxy-2'-fluorocytidine-3'-phosphate
  modified_base 17: mod_base = OTHER; note = 2'-O-methyluridine-3'-phosphate
  modified_base 18: mod_base = OTHER; note = 2'-O-methyladenosine-3'-phosphate
  modified_base 19: mod_base = OTHER; note = 2'-O-methyluridine-3'-phosphate
  modified_base 20: mod_base = OTHER; note = 2'-O-methyluridine-3'-phosphate
  modified_base 21: mod_base = OTHER; note = 2'-O-methyluridine-3'-phosphate
  modified_base 22: mod_base = OTHER; note = 2'-O-methylguanosine-3'-phosphate
  modified_base 23: mod_base = OTHER; note = 2'-O-methyluridine
ttgaatacaaataatctatttgt
